(19) United States
(12) Patent Application Publication
(10) Pub. No.: US 2024/0294920 A1
(43) Pub. Date: Sep. 5, 2024

(54) MODULATION OF NOX4 EXPRESSION

(71) Applicant: Ionis Pharmaceuticals, Inc., Carlsbad, CA (US)

(72) Inventors: Jeffrey R. Crosby, Carlsbad, CA (US); Chenguang Zhao, San Diego, CA (US); Alexey Revenko, San Diego, CA (US); Shuling Guo, Carlsbad, CA (US)

(73) Assignee: Ionis Pharmaceuticals, Inc., Carlsbad, CA (US)

(21) Appl. No.: 18/569,084

(22) PCT Filed: Jun. 30, 2022
(86) PCT No.: PCT/US2022/035735

§ 371 Date: Dec. 11, 2023

Related U.S. Application Data
(60) Provisional application No. 63/217,542, filed on Jul. 1, 2021.

(51) Int. Cl. C12N 15/113; A61P 11/00

(52) U.S. Cl. CPC C12N 15/1137; A61P 11/00; C12Y 106/03001; C12N 2310/11; C12N 2310/14; C12N 2310/316; C12N 2310/321; C12N 2310/322; C12N 2310/3231; C12N 2310/3341; C12N 2320/32

(57) ABSTRACT

Provided herein are methods, antisense agents, specific inhibitors, and compositions useful for reducing expression or activity of NADPH oxidase 4 (hereinafter referred to as NOX4) in a subject. Also, provided herein are methods, antisense agents, specific inhibitors, and compositions that can be useful in treating NOX4-related diseases or conditions in a subject. Such methods, antisense agents, specific inhibitors, and compositions can be useful, for example, to treat a pulmonary disease in a subject.

### SEQUENCE LISTING

[0001] The present application is being filed along with a Sequence Listing in electronic format. The Sequence Listing is provided as a file entitled BIOL0422WOSEQ_ST25.txt, created on Jun. 21, 2022, which is 612 Kb in size. The information in the electronic format of the sequence listing is incorporated herein by reference in its entirety.

### FIELD

[0002] Provided herein are methods, antisense agents, specific inhibitors, and compositions useful for reducing expression or activity of NADPH oxidase 4 (hereinafter referred to as NOX4) in a subject. Also, provided herein are methods, antisense agents, specific inhibitors, and compositions that can be useful in treating NOX4-related diseases or conditions in a subject. Such methods, antisense agents, specific inhibitors, and compositions can be useful, for example, to treat a pulmonary disease in a subject.

### BACKGROUND

[0003] Chronic obstructive pulmonary disease (COPD) is a pulmonary condition characterized by chronic obstruction of airflow in the lungs. COPD encompasses a variety of respiratory disorders including emphysema and chronic bronchitis. COPD is characterized by chronic inflammation of the bronchial tubes and is often a result of exposure to toxins such as tobacco smoke. Symptoms of COPD include coughing, wheezing, difficulty breathing, frequent respiratory infections, and coughing with mucus. COPD is a leading cause of morbidity and mortality worldwide (M. Varmaghani et al., East Mediterr Health J. 25, 47-57 (2019); J. L. López-Campos, W. Tan, J. B. Soriano, Respirology. 21, 14-23 (2016)) and poses an increasing public health problem (S. A. Quaderi, J. R. Hurst, Global Health, Epidemiology and Genomics. 3 (2018)).

[0004] COPD is a chronic and progressive disease that requires lifelong disease management. The use of bronchodilators can mediate symptoms of COPD (F. Patalano et al., European Respiratory Review. 23, 333-344 (2014)); however, there is currently no cure or treatment available to prevent disease progression (J. Y. Choi, C. K. Rhee, Journal of Clinical Medicine. 9, 3426 (2020), A. Ngkelo, I. M. Adcock, Current Opinion in Pharmacology. 13, 362-369 (2013)).

[0005] Pulmonary hypertension (PH) is a complication commonly associated with COPD (A. Chaouat, R. Naeije, E. Weitzenblum, European Respiratory Journal. 32, 1371-1385 (2008)), although PH may be caused by other factors including left-sided heart disease, lung disease, chronic blood clots, and other health conditions (M. D. McGoon, G. C. Kane, Mayo Clin Proc. 84, 191-207 (2009)). In certain circumstances, PH may be considered to be a separate phenomenon than the presumed causal mechanism (M. D. McGoon, G. C. Kane, Mayo Clin Proc. 84, 191-207 (2009)) for example, secondary to idiopathic pulmonary fibrosis (Ruffenach, et al., Respiratory Research, 21, 303 (2020)). Similarly with COPD, individuals with PH often have difficulty breathing and shortness of breath. Further signs and symptoms of PH include chest pressure or pain; edema in ankles, legs, or feet; vascular remodeling; low blood oxygen (hypoxemia); increased blood pressure (hypertension), fatigue, and dizziness. Achieving disease control is difficult in PH (M. Humbert, E. M. T. Lau, CHEST. 156, 1039-1042 (2019)), and currently existing medications do not reverse or prevent progression of the disease (L. D. Harvey, S. Y. Chan, Journal of Clinical Medicine. 6, 43 (2017)).

### SUMMARY

[0006] Provided herein are methods, antisense agents, specific inhibitors, and compositions for modulating expression of NOX4-associated with pulmonary diseases or disorders. In certain embodiments, these compositions, compounds, and methods are for modulating the expression of NOX4. In certain embodiments, the NOX4 modulator is a NOX4-specific inhibitor. In certain embodiments, the NOX4-specific inhibitor decreases expression or activity of NOX4. In certain embodiments, NOX4-specific inhibitors include nucleic acids, proteins and small molecules. In certain embodiments, the NOX4-specific inhibitor is a nucleic acid. In certain embodiments, the NOX4-specific inhibitor is an antisense agent. In certain embodiments, the NOX4-specific inhibitor comprises a modified oligonucleotide. In certain embodiments, the modified oligonucleotide can be single stranded or double stranded.

[0007] Certain embodiments are directed to compounds useful for inhibiting NOX4, which can be useful for treating a pulmonary disease or disorder. Certain embodiments relate to the novel findings of antisense inhibition of NOX4 resulting in improvement of symptoms or endpoints associated with a pulmonary disease or disorder. Certain embodiments are directed to compounds useful in improving spirometry, lung function, oxygen saturation, or blood pressure, or a combination thereof.

[0008] Certain embodiments are described in the numbered embodiments below:
[0009] Embodiment 1. A method of treating a pulmonary disease or disorder in a subject having, or at risk of having, a pulmonary disease or disorder comprising administering a NOX4-specific inhibitor to the subject, thereby treating the pulmonary disease or disorder in the subject.
[0010] Embodiment 2. The method of embodiment 1, wherein the pulmonary disease or disorder is chronic obstructive pulmonary disease (COPD) or pulmonary hypertension (PH).
[0011] Embodiment 3. The method of embodiment 1 or embodiment 2, wherein the administration of the NOX4-specific inhibitor ameliorates at least one symptom of the pulmonary disease or disorder.
[0012] Embodiment 4. The method of embodiment 3, wherein the symptom is coughing, wheezing, difficulty breathing, shortness of breath, chest pressure, chest pain, edema in one or both ankles, edema in one or both legs, edema in one or both feet, vascular remodeling, low blood oxygen, increased blood pressure, fatigue, dizziness, frequent respiratory infections, or coughing with mucus.
[0013] Embodiment 5. The method of any of embodiments 1-4, wherein administration of the NOX4-specific inhibitor reduces coughing, reduces wheezing, improves breathing, reduces shortness of breath, reduces chest pressure, reduces chest pain, reduces edema in one or both ankles, reduces edema in one or both legs, reduces edema in one or both feet, reduces or reverses vascular remodeling, increases blood oxygen, decreases blood pressure, reduces fatigue, reduces dizziness, reduces the frequency of respiratory infections, reduces coughing with mucus, or a combination thereof.
[0014] Embodiment 6. The method of any of embodiments 1-5, wherein administering the NOX4-specific inhibitor improves spirometry, lung function, oxygen saturation, or blood pressure, or a combination thereof.
[0015] Embodiment 7. The method of any of embodiments 1-6, wherein administering the NOX4-specific inhibitor reduces bronchial tube inflammation, increases spirometry levels of forced vital capacity, increases spirometry levels of forced expiratory volume, improves lung function, increases oxygen saturation, or decreases blood pressure, or a combination thereof.
[0016] Embodiment 8. The method of any of embodiments 1-7, wherein the subject is a human subject.
[0017] Embodiment 9. A method of inhibiting expression or activity of NOX4 in a cell comprising contacting the cell with a NOX4-specific inhibitor, thereby inhibiting expression or activity of NOX4 in the cell.
[0018] Embodiment 10. The method of embodiment 9, wherein the cell is a human cell.
[0019] Embodiment 11. The method of embodiment 9 or embodiment 10, wherein the cell is a lung cell.
[0020] Embodiment 12. The method of any of embodiments 9-11, wherein the cell is in a subject.
[0021] Embodiment 13. The method of embodiment 12, wherein the subject is human.
[0022] Embodiment 14. The method of embodiment 12 or embodiment 13, wherein the subject has, or is at risk of having a pulmonary disease or disorder.
[0023] Embodiment 15. The method of embodiment 14, wherein the pulmonary disease or disorder is COPD, or PH.
[0024] Embodiment 16. Use of a NOX4-specific inhibitor for the manufacture or preparation of a medicament for treating a pulmonary disease or disorder.
[0025] Embodiment 17. Use of a NOX4-specific inhibitor for the treatment of a pulmonary disease or disorder.
[0026] Embodiment 18. The use of embodiment 16 or embodiment 17, wherein the pulmonary disease or disorder is COPD or PH.
[0027] Embodiment 19. The use of any of embodiments 16-18, wherein the NOX4-specific inhibitor ameliorates at least one symptom of the pulmonary disease or disorder.
[0028] Embodiment 20. The use of embodiment 19, wherein the symptom is coughing, wheezing, difficulty breathing, shortness of breath, chest pressure, chest pain, edema in one or both ankles, edema in one or both legs, edema in one or both feet, vascular remodeling, low blood oxygen, increased blood pressure, fatigue, dizziness, frequent respiratory infections, or coughing with mucus Embodiment 21. The use of embodiment 19 or embodiment 20, wherein the NOX4-specific inhibitor reduces coughing, reduces wheezing, improves breathing, reduces shortness of breath, reduces chest pressure, reduces chest pain, reduces edema in one or both ankles, reduces edema in one or both legs, reduces edema in one or both feet, reduces or reverses vascular remodeling, increases blood oxygen, decreases blood pressure, reduces fatigue, reduces dizziness, reduces the frequency of respiratory infections, reduces coughing with mucus, or a combination thereof.
[0029] Embodiment 22. The use of any of embodiments 16-21, wherein the NOX4-specific inhibitor improves spirometry, lung function, oxygen saturation, or blood pressure, or a combination thereof.
[0030] Embodiment 23. The use of any of embodiments 16-22, wherein the NOX4-specific inhibitor reduces bronchial tube inflammation, increases spirometry levels of forced vital capacity, increases spirometry levels of forced expiratory volume, improves lung function, increases oxygen saturation, or decreases blood pressure, or a combination thereof.
[0031] Embodiment 24. The method or use of any of embodiments 1-23, wherein the NOX4-specific inhibitor is an antisense agent, a polypeptide, an antibody, or a small molecule.
[0032] Embodiment 25. The method or use of any of embodiments 1-24, wherein the NOX4-specific inhibitor is an antisense agent comprising a modified oligonucleotide, wherein the modified oligonucleotide has a nucleobase sequence complementary to any one of SEQ ID NOs: 1-5.
[0033] Embodiment 26. The method or use of embodiment 25, wherein the nucleobase sequence of the modified oligonucleotide is complementary to SEQ ID NO: 3 or SEQ ID NO: 4.
[0034] Embodiment 27. The method or use of embodiment 26, wherein the nucleobase sequence of the modified oligonucleotide is at least 90% complementary to the nucleobase sequence of an equal length portion of SEQ ID NO: 3 or SEQ ID NO: 4.
[0035] Embodiment 28. The method or use of embodiment 26, wherein the nucleobase sequence of the modified oligonucleotide is at least 95% complementary to the nucleobase sequence of an equal length portion of SEQ ID NO: 3 or SEQ ID NO: 4.
[0036] Embodiment 29. The method or use of embodiment 28, wherein the nucleobase sequence of the modified oligonucleotide is 100% complementary to the nucleobase sequence of an equal length portion of SEQ ID NO: 3 or SEQ ID NO: 4.
[0037] Embodiment 30. The method or use of any of embodiments 24-29, wherein the antisense agent is single-stranded.
[0038] Embodiment 31. The method or use of any of embodiments 24-29, wherein the antisense agent is double-stranded.
[0039] Embodiment 32. The method or use of any of embodiments 25-29, wherein the modified oligonucleotide consists of 12 to 30 linked nucleosides.
[0040] Embodiment 33. The method or use of any of embodiments 25-32, wherein at least nucleoside of the modified oligonucleotide comprises a modified nucleobase.
[0041] Embodiment 34. The method or use of embodiment 33, wherein the modified nucleobase is a 5-methylcytosine.
[0042] Embodiment 35. The method or use of any of embodiments 25-34, wherein at least one nucleoside of the modified oligonucleotide comprises a modified sugar moiety.
[0043] Embodiment 36. The method or use of embodiment 35, wherein the modified sugar moiety is a bicyclic sugar moiety.
[0044] Embodiment 37. The method or use of embodiment 36, wherein the modified sugar comprises a 4′-CH(CH₃)—O-2′ bridge or a 4′-(CH₂)ₙ—O-2′ bridge, wherein n is 1 or 2.
[0045] Embodiment 38. The method or use of embodiment 37, wherein the modified sugar moiety comprises a non-bicyclic modified sugar moiety.
[0046] Embodiment 39. The method or use of embodiment 38, wherein the non-bicyclic sugar moiety is a 2′-F, 2′-OMe, or 2′-MOE sugar moiety.
[0047] Embodiment 40. The method or use of any of embodiments 25-39, wherein the modified oligonucleotide has:
   [0048] a gap segment consisting of linked 2′-deoxynucleosides;
   [0049] a 5′ wing segment consisting of linked nucleosides;
   [0050] a 3′ wing segment consisting linked nucleosides;
   [0051] wherein the gap segment is positioned immediately adjacent to and between the 5′ wing segment and the 3′ wing segment and wherein each nucleoside of each wing segment comprises a modified sugar moiety.
[0052] Embodiment 41. The method or use of any of embodiments 25-39, wherein the modified oligonucleotide has
   [0053] a sugar motif comprising:
   [0054] a 5′-region consisting of 1-6 linked 5′-region nucleosides;
      [0055] a central region consisting of 6-10 linked central region nucleosides; and
      [0056] a 3′-region consisting of 1-6 linked 3′-region nucleosides;
   [0057] wherein the 3′-most nucleoside of the 5′-region and the 5′-most nucleoside of the 3′-region comprise modified sugar moieties, and
   [0058] each of the central region nucleosides is selected from a nucleoside comprising a 2′-β-D-deoxyribosyl sugar moiety and a nucleoside comprising a 2′-substituted sugar moiety, wherein the central region comprises at least six nucleosides comprising a 2′-β-D-deoxyribosyl sugar moiety and no more than two nucleosides comprise a 2′-substituted sugar moiety.
[0059] Embodiment 42. The method or use of embodiment 41, wherein the central region consists of 6-10 nucleosides comprising a 2′-β-D-deoxyribosyl sugar moiety.
[0060] Embodiment 43. The method or use of any one of embodiments 25-42, wherein at least one internucleoside linkage of the modified oligonucleotide is a modified internucleoside linkage.
[0061] Embodiment 44. The method or use of embodiment 43, wherein the at least one modified internucleoside linkage is a phosphorothioate internucleoside linkage.
[0062] Embodiment 45. The method or use of embodiment 44, wherein each internucleoside linkage is a phosphorothioate internucleoside linkage.
[0063] Embodiment 46. The method or use of embodiment 44, wherein each internucleoside linkage is independently selected from a phosphodiester internucleoside linkage and a phosphorothioate internucleoside linkage.
[0064] Embodiment 47. The method or use of any of embodiments 24-46, wherein the antisense agent comprises a conjugate group.
[0065] Embodiment 48. The method or use of any of embodiments 1-47, wherein the NOX4-specific inhibitor is an RNase H agent capable of reducing the amount of NOX4 nucleic acid through the activation of RNase H.
[0066] Embodiment 49. The method or use of any of embodiments 1-47, wherein the NOX4-specific inhibitor is an RNAi agent capable of reducing the amount of NOX4 nucleic acid through the activation of RISC/Ago2.
[0067] Embodiment 50. The method or use of any of embodiments 1-47, wherein the NOX4-specific inhibitor is a steric-blocking agent capable of directly binding to a target nucleic acid, thereby blocking the interaction of the NOX4 nucleic acid with other nucleic acids or proteins.
[0068] Embodiment 51. The method of any of embodiments 1-8 or 16-50, wherein a therapeutic amount of the NOX4-specific inhibitor is administered to the subject.
[0069] Embodiment 52. The method of any of embodiments 1-8 or 16-51, wherein the NOX4-specific inhibitor is administered by aerosolized delivery.
[0070] Embodiment 53. The method of any of embodiments 1-8 or 16-51, wherein the NOX4-specific inhibitor is administered via a nebulizer or inhaler.

### DETAILED DESCRIPTION

[0071] It is to be understood that both the foregoing general description and the following detailed description are exemplary and explanatory only and are not restrictive of the embodiments, as claimed. Herein, the use of the singular includes the plural unless specifically stated otherwise. As used herein, the use of “or” means “and/or” unless stated otherwise. Furthermore, the use of the term “including” as well as other forms, such as “includes” and “included”, is not limiting. Also, terms such as “element” or “component” encompass both elements and components comprising one unit and elements and components that comprise more than one subunit, unless specifically stated otherwise.

[0072] The section headings used herein are for organizational purposes only and are not to be construed as limiting the subject matter described. All documents, or portions of documents, cited in this application, including, but not limited to, patents, patent applications, articles, books, treatises, and GenBank and NCBI reference sequence records are hereby expressly incorporated by reference for the portions of the document discussed herein, as well as in their entirety.

[0073] It is understood that the sequence set forth in each SEQ ID NO in the examples contained herein is independent of any modification to a sugar moiety, an internucleoside linkage, or a nucleobase. As such, compounds defined by a SEQ ID NO may comprise, independently, one or more modifications to a sugar moiety, an internucleoside linkage, or a nucleobase. Compounds described by ISIS/IONIS number (ISIS/ION #) indicate a combination of nucleobase sequence, chemical modification, and motif.

[0074] Unless specific definitions are provided, the nomenclature used in connection with, and the procedures and techniques of, analytical chemistry, synthetic organic chemistry, and medicinal and pharmaceutical chemistry described herein are those well-known and commonly used in the art. Where permitted, all patents, applications, published applications and other publications and other data referred to throughout in the disclosure are incorporated by reference herein in their entirety.

[0075] Unless otherwise indicated, the following terms have the following meanings: “2′-deoxynucleoside” means a nucleoside comprising 2′-H(H) furanosyl sugar moiety, as found in naturally occurring deoxyribonucleic acids (DNA). In certain embodiments, a 2′-deoxynucleoside is a 2′-β-D-deoxynucleoside and comprises a 2′-β-D-deoxyribosyl sugar moiety, which has the β-D ribosyl configuration as found in naturally occurring deoxyribonucleic acids (DNA). In certain embodiments, a 2′-deoxynucleoside may comprise a modified nucleobase or may comprise an RNA nucleobase (uracil).

[0076] “2′-MOE” means a 2′-OCH₂CH₂OCH₃ group in place of the 2′-OH group of a furanosyl sugar moiety. A “2′-MOE sugar moiety” or a “2′-MOE modified sugar moiety” means a sugar moiety with a 2′-OCH₂CH₂OCH₃ group in place of the 2′-OH group of a furanosyl sugar moiety. Unless otherwise indicated, a 2′-MOE sugar moiety is in the β-D-ribosyl configuration. “MOE” means O-methoxyethyl. “2′-MOE nucleoside” (also 2′-O-methoxyethyl nucleoside) means a nucleoside comprising a 2′-MOE sugar moiety.

[0077] “2′-OMe” means a 2′-OCH₃ group in place of the 2′-OH group of a furanosyl sugar moiety. A″2′-O-methyl sugar moiety” or “2′-OMe sugar moiety” or a “2′-OMe modified sugar moiety” means a sugar moiety with a 2′-OCH₃ group in place of the 2′-OH group of a furanosyl sugar moiety. Unless otherwise indicated, a 2′-OMe sugar moiety is in the β-D-ribosyl configuration.

[0078] As used herein, “2′-OMe nucleoside” means a nucleoside comprising a 2′-OMe sugar moiety.

[0079] As used herein, “2′-F” means a 2′-fluoro group in place of the 2′-OH group of a ribosyl sugar moiety. A “2′-F sugar moiety” or “2′-fluororibosyl sugar moiety” means a sugar moiety with a 2′-F group in place of the 2′-OH group of a ribosyl sugar moiety. Unless otherwise indicated, a 2′-F has the β-D ribosyl stereochemical configuration.

[0080] As used herein, “2′-F nucleoside” means a nucleoside comprising a 2′-F sugar moiety.
[0081] “2′-substituted nucleoside” or “2-modified nucleoside” means a nucleoside comprising a 2′-substituted or 2′-modified sugar moiety. As used herein, “2′-substituted” or “2-modified” in reference to a sugar moiety means a sugar moiety comprising at least one 2′-substituent group other than H or OH.
[0082] “3′ target site” refers to the nucleotide of a target nucleic acid which is complementary to the 3′-most nucleotide of a particular compound.
[0083] “5′ target site” refers to the nucleotide of a target nucleic acid which is complementary to the 5′-most nucleotide of a particular compound.
[0084] “5-methylcytosine” means a cytosine with a methyl group attached to the 5 position. A 5-methylcytosine is a modified nucleobase.

[0085] “About” means within +10% of a value. For example, if it is stated, “the compounds affected about 70% inhibition of NOX4”, it is implied that NOX4 levels are inhibited within a range of 60% and 80%.

[0086] As used herein, “administration” or “administering” means providing a pharmaceutical agent or composition to an animal.

[0087] “Administered concomitantly” or “co-administration” means administration of two or more compounds in any manner in which the pharmacological effects of both are manifest in the patient. Concomitant administration does not require that both compounds be administered in a single pharmaceutical composition, in the same dosage form, by the same route of administration, or at the same time. The effects of both compounds need not manifest themselves at the same time. The effects need only be overlapping for a period of time and need not be coextensive. Concomitant administration or co-administration encompasses administration in parallel or sequentially.

[0088] “Ameliorate” refers to an improving or lessening of at least one indicator, sign, hallmark, or symptom of an associated disease, disorder, or condition relative to the same indicator, sign, hallmark, or symptom in the absence of the treatment. In certain embodiments, amelioration includes a delay or slowing in the progression or severity of one or more indicators of a condition or disease. The progression or severity of indicators may be determined by subjective or objective measures, which are known to those skilled in the art. In certain embodiments, amelioration is the reduction in the severity or frequency of a symptom or hallmark or the delayed onset or slowing of progression in the severity or frequency of a symptom or hallmark. In certain embodiments, the symptom or hallmark is one or more of coughing, wheezing, difficulty breathing, shortness of breath, chest pressure, chest pain, edema in one or both ankles, edema in one or both legs, or edema in one or both feet, vascular remodeling, low blood oxygen, increased blood pressure, fatigue, dizziness, frequent respiratory infections, or coughing with mucus.

[0089] “Antisense activity” means any detectable and/or measurable change in an amount of a target nucleic acid, or protein encoded by such target nucleic acid, attributable to the hybridization of an antisense compound to its target nucleic acid. In certain embodiments, antisense activity is a decrease in the amount of a target nucleic acid, or protein encoded by such target nucleic acid, compared to the amount of target nucleic acid, or protein encoded by such target nucleic acid, in the absence of the antisense compound. In certain embodiments, the change is detectable in a cell that has been contacted with the antisense compound or a cell lysate thereof. In certain embodiments, the change is detectable in a biological sample obtained from a subject to whom the antisense compound has been administered. Non-limiting examples of biological samples include a liver biopsy sample, a blood sample, a plasma/serum sample, a saliva sample, a urine sample, a lung biopsy sample, a bronchial brushings sample, a bronchoalveolar lavage sample, a saliva sample, a sputum sample, and a breath condensate sample.

[0090] “Antisense agent” means an antisense compound and optionally one or more additional features, such as a sense compound. An antisense agent includes, but is not limited to, an RNAi agent and an RNase H agent.

[0091] “Antisense compound” means an oligonucleotide, such as an antisense oligonucleotide, and optionally one or more additional features, such as a conjugate group

[0092] “Sense compound” means a sense oligonucleotide and optionally one or more additional features, such as a conjugate group.

[0093] “Antisense inhibition” means reduction of target nucleic acid levels in the presence of an antisense agent or antisense compound comprising an oligonucleotide complementary to a target nucleic acid compared to target nucleic acid levels in the absence of the antisense compound.

[0094] “Antisense oligonucleotide” means an oligonucleotide, including the oligonucleotide portion of an antisense compound, that is capable of hybridizing to a target nucleic acid and is capable of at least one antisense activity. Antisense oligonucleotides include but are not limited to antisense RNAi oligonucleotides and antisense RNase H oligonucleotides.

[0095] “Sense oligonucleotide” means an oligonucleotide, including the oligonucleotide portion of a sense compound, that is capable of hybridizing to an antisense oligonucleotide.

[0096] “Bicyclic nucleoside” or “BNA” means a nucleoside comprising a bicyclic sugar moiety. “Bicyclic sugar” or “bicyclic sugar moiety” means a modified sugar moiety comprising two rings, wherein the second ring is formed via a bridge connecting two of the atoms in the first ring thereby forming a bicyclic structure. In certain embodiments, the first ring of the bicyclic sugar moiety is a furanosyl moiety. In certain embodiments, the furanosyl sugar moiety is a ribosyl sugar moiety. In certain embodiments, the bicyclic sugar moiety does not comprise a furanosyl moiety.

[0097] “Branching group” means a group of atoms having at least 3 positions that are capable of forming covalent linkages to at least 3 groups. In certain embodiments, a branching group provides a plurality of reactive sites for connecting tethered ligands to an oligonucleotide via a conjugate linker and/or a cleavable moiety.

[0098] “Cell-targeting moiety” means a conjugate group or portion of a conjugate group that is capable of binding to a particular cell type or particular cell types.

[0099] “cEt” or “constrained ethyl” means a bicyclic furanosyl sugar moiety comprising a bridge connecting the 4′-carbon and the 2′-carbon, wherein the bridge has the formula: 4′-CH(CH₃)—O-2′. As used herein, “constrained ethyl nucleoside” or “cEt nucleoside” means:

[chemical structure]

wherein Bx is a nucleobase

[0100] “Constrained ethyl” or “cEt” or “cEt sugar moiety” means the sugar moiety of a cEt nucleoside.

[0101] “Chemical modification” in a compound describes the substitutions or changes through chemical reaction, of any of the units in the compound. “Modified nucleoside” means a nucleoside having, independently, a modified sugar moiety and/or modified nucleobase. “Modified oligonucleotide” means an oligonucleotide comprising at least one modified internucleoside linkage, a modified sugar, and/or a modified nucleobase.

[0102] “Chemically distinct region” refers to a region of a compound that is in some way chemically different than another region of the same compound. For example, a region having 2′-O-methoxyethyl nucleotides is chemically distinct from a region having nucleotides without 2′-O-methoxyethyl modifications.

[0103] “Cleavable bond” means any chemical bond capable of being split. In certain embodiments, a cleavable bond is selected from among: an amide, a polyamide, an ester, an ether, one or both esters of a phosphodiester, a phosphate ester, a carbamate, a di-sulfide, or a peptide.

[0104] “Cleavable moiety” means a bond or group of atoms that is cleaved under physiological conditions, for example, inside a cell, an animal, or a human.

[0105] “Complementary” in reference to an oligonucleotide means that at least 70% of the nucleobases of the oligonucleotide and the nucleobases of another nucleic acid or one or more regions thereof are capable of hydrogen bonding with one another when the nucleobase sequence of the oligonucleotide and the other nucleic acid are aligned in opposing directions. “Complementary region” in reference to a region of an oligonucleotide means that at least 70% of the nucleobases of that region and the nucleobases of another nucleic acid or one or more regions thereof are capable of hydrogen bonding with one another when the nucleobase sequence of the oligonucleotide and the other nucleic acid are aligned in opposing directions. Complementary nucleobases mean nucleobases that are capable of forming hydrogen bonds with one another. Complementary nucleobase pairs include adenine (A) and thymine (T), adenine (A) and uracil (U), cytosine (C) and guanine (G), 5-methylcytosine (mC) and guanine (G). Certain modified nucleobases that pair with natural nucleobases or with other modified nucleobases are known in the art and are not considered complementary nucleobases as defined herein unless indicated otherwise. For example, inosine can pair, but is not considered complementary, with adenosine, cytosine, or uracil. Complementary oligonucleotides and/or nucleic acids need not have nucleobase complementarity at each nucleoside. Rather, some mismatches are tolerated. As used herein, “fully complementary” or “100% complementary” in reference to oligonucleotides means that oligonucleotides are complementary to another oligonucleotide or nucleic acid at each nucleoside of the oligonucleotide. 5-methylcytosine“Conjugate group” means a group of atoms that is attached to an oligonucleotide. Conjugate groups include a conjugate moiety and a conjugate linker that attaches the conjugate moiety to the oligonucleotide.

[0106] “Conjugate linker” means a group of atoms comprising at least one bond that connects a conjugate moiety to an oligonucleotide.

[0107] “Conjugate moiety” means a group of atoms that is attached to an oligonucleotide via a conjugate linker. A conjugate moiety modifies one or more properties of a molecule compared to the identical molecule lacking the conjugate moiety, including but not limited to pharmacodynamics, pharmacokinetics, stability, binding, absorption, tissue distribution, cellular distribution, cellular uptake, charge and clearance.

[0108] “Contiguous” in the context of an oligonucleotide refers to nucleosides, nucleobases, sugar moieties, or internucleoside linkages that are immediately adjacent to each other. For example, “contiguous nucleobases” means nucleobases that are immediately adjacent to each other in a sequence.

[0109] “Designing” or “Designed to” refer to the process of designing a compound that specifically hybridizes with a selected nucleic acid molecule.

[0110] “Diluent” means an ingredient in a composition that lacks pharmacological activity, but is pharmaceutically necessary or desirable. For example, the diluent in an injected composition can be a liquid, e.g. saline solution.

[0111] “Differently modified” mean chemical modifications or chemical substituents that are different from one another, including absence of modifications. Thus, for example, a 2′-MOE nucleoside and an unmodified DNA nucleoside are “differently modified,” even though the DNA nucleoside is unmodified. Likewise, DNA and RNA are “differently modified,” even though both are naturally-occurring unmodified nucleosides. Nucleosides that are the same but for comprising different nucleobases are not differently modified. For example, a nucleoside comprising a 2′-OMe sugar moiety and an unmodified adenine nucleobase and a nucleoside comprising a 2′-OMe sugar moiety and an unmodified thymine nucleobase are not differently modified.

[0112] “Dose” means a specified quantity of a compound or pharmaceutical agent provided in a single administration, or in a specified time period. In certain embodiments, a dose may be administered in two or more boluses, tablets, injections, or inhalations. In certain embodiments, a dose may be aerosolized. For example, in certain embodiments, where subcutaneous administration is desired, the desired dose may require a volume not easily accommodated by a single injection. In such embodiments, two or more injections may be used to achieve the desired dose. In certain embodiments, a dose may be administered in two or more injections to minimize injection site reaction in a subject. In other embodiments, the compound or pharmaceutical agent is administered by infusion over an extended period of time or continuously. Doses may be stated as the amount of pharmaceutical agent per hour, day, week or month.

[0113] “Double-stranded” in reference to an antisense agent means the antisense agent has two oligonucleotides that are sufficiently complementary to each other to form a duplex. “Double-stranded” in reference to a region or an oligonucleotide means a duplex formed by complementary strands of nucleic acids (including, but not limited to oligonucleotides) hybridized to one another. In certain embodiments, the two strands of a double-stranded region are separate molecules. In certain embodiments, the two strands are regions of the same molecule that has folded onto itself (e.g., a hairpin structure).

[0114] “Efficacy” means the ability to produce a desired effect.

[0115] “Expression” includes all the functions by which a gene's coded information is converted into structures present and operating in a cell. Such structures include, but are not limited to the products of transcription and translation.

[0116] “Gapmer” means a modified oligonucleotide comprising an internal region positioned between external regions having one or more nucleosides, wherein the nucleosides comprising the internal region are chemically distinct from the nucleoside or nucleosides comprising the external regions, and wherein the modified oligonucleotide supports RNAse H cleavage. The internal region may be referred to as the “gap” and the external regions may be referred to as the “wings.” In certain embodiments, the internal region is a deoxy region. The positions of the internal region or gap refer to the order of the nucleosides of the internal region and are counted starting from the 5′-end of the internal region. Unless otherwise indicated, “gapmer” refers to a sugar motif. In certain embodiments, each nucleoside of the gap is a 2′-β-D-deoxynucleoside. In certain embodiments, the gap comprises one 2′-substituted nucleoside at position 1, 2, 3, 4, or 5 of the gap, and the remainder of the nucleosides of the gap are 2′-β-D-deoxynucleosides. As used herein, the term “MOE gapmer” indicates a gapmer having a gap comprising 2′-β-D-deoxynucleosides and wings comprising 2′-MOE nucleosides. As used herein, the term “mixed wing gapmer” indicates a gapmer having wings comprising modified nucleosides comprising at least two different sugar modifications. Unless otherwise indicated, a gapmer may comprise one or more modified internucleoside linkages and/or modified nucleobases and such modifications do not necessarily follow the gapmer pattern of the sugar modifications. “Hybridization” means annealing of oligonucleotides and/or nucleic acids. While not limited to a particular mechanism, the most common mechanism of hybridization involves hydrogen bonding, which may be Watson-Crick, Hoogsteen or reversed Hoogsteen hydrogen bonding, between complementary nucleobases. In certain embodiments, complementary nucleic acid molecules include, but are not limited to, an antisense compound and a nucleic acid target. In certain embodiments, complementary nucleic acid molecules include, but are not limited to, an oligonucleotide and a nucleic acid target.

[0117] “Immediately adjacent” means there are no intervening elements between the immediately adjacent elements of the same kind (e.g. no intervening nucleobases between the immediately adjacent nucleobases).

[0118] “Inhaled administration” means administration within the respiratory tract by inhaling orally or nasally for local or systemic effect. Inhaled administration may involve aerosolization and/or dispersal by a nebulizer or inhaler.

[0119] “Inhibiting or reducing the expression or activity” refers to a reduction or blockade of the expression or activity relative to the expression of activity in an untreated or control sample and does not necessarily indicate a total elimination of expression or activity.

[0120] “Internucleoside linkage” means a group or bond that forms a covalent linkage between adjacent nucleosides in an oligonucleotide. “Modified internucleoside linkage” means any internucleoside linkage other than a naturally occurring, phosphate internucleoside linkage. Non-phosphate linkages are referred to herein as modified internucleoside linkages.

[0121] “Linked nucleosides” means adjacent nucleosides linked together by an internucleoside linkage.

[0122] “Mismatch” or “non-complementary” means a nucleobase of a first oligonucleotide that is not complementary to the corresponding nucleobase of a second oligonucleotide or target nucleic acid when the first and second oligonucleotides are aligned. For example, nucleobases including but not limited to a universal nucleobase, inosine, and hypoxanthine, are capable of hybridizing with at least one nucleobase but are still mismatched or non-complementary with respect to nucleobase to which it hybridized. As another example, a nucleobase of a first oligonucleotide that is not capable of hybridizing to the corresponding nucleobase of a second oligonucleotide or target nucleic acid when the first and second oligonucleotides are aligned is a mismatch or non-complementary nucleobase.

[0123] “Modulating” refers to changing or adjusting a feature in a cell, tissue, organ or organism. For example, modulating NOX4 can mean to increase or decrease the level of NOX4 in a cell, tissue, organ or organism. A “modulator” effects the change in the cell, tissue, organ or organism. For example, a compound can be a modulator of NOX4 that decreases the amount of NOX4 in a cell, tissue, organ or organism.

[0124] “Monomer” refers to a single unit of an oligomer. Monomers include, but are not limited to, nucleosides and nucleotides.

[0125] “Motif” means the pattern of unmodified and/or modified sugar moieties, nucleobases, and/or internucleoside linkages, in an oligonucleotide.

[0126] “Natural” or “naturally occurring” means found in nature.

[0127] “Non-bicyclic modified sugar” or “non-bicyclic modified sugar moiety” means a modified sugar moiety that comprises a modification, such as a substituent, that does not form a bridge between two atoms of the sugar to form a second ring.

[0128] “NOX4” means NADPH oxidase 4 and refers to any NOX4 nucleic acid or NOX4 protein. In certain embodiments, NOX4 includes a DNA sequence encoding NOX4, an RNA sequence transcribed from DNA encoding NOX4 (including genomic DNA comprising introns and exons), or a NOX4 protein. The target may be referred to in either upper or lower case.

[0129] “NOX4-specific inhibitor” refers to any agent capable of specifically reducing NOX4 RNA or NOX4 protein in a cell relative to a cell that is not exposed to the agent. NOX4-specific inhibitors include nucleic acids (including antisense compounds), peptides, antibodies, small molecules, and other agents capable of inhibiting the expression or activity of NOX4.

[0130] “Nucleic acid” refers to molecules composed of monomeric nucleotides. A nucleic acid includes, but is not limited to, ribonucleic acids (RNA), deoxyribonucleic acids (DNA), single-stranded nucleic acids, and double-stranded nucleic acids.

[0131] “Nucleobase” means an unmodified nucleobase or a modified nucleobase. A nucleobase is a heterocyclic moiety. As used herein an “unmodified nucleobase” is adenine (A), thymine (T), cytosine (C), uracil (U), or guanine (G). As used herein, a “modified nucleobase” is a group of atoms other than unmodified A, T, C, U, or G capable of pairing with at least one other nucleobase. A “5-methylcytosine” is a modified nucleobase. A universal base is a modified nucleobase that can pair with any one of the five unmodified nucleobases. “Nucleobase sequence” means the order of contiguous nucleobases in a nucleic acid or oligonucleotide independent of any sugar or internucleoside linkage.

[0132] “Nucleoside” means a compound comprising a nucleobase and a sugar moiety. The nucleobase and sugar moiety are each, independently, unmodified or modified. “Modified nucleoside” means a nucleoside comprising a modified nucleobase and/or a modified sugar moiety. Modified nucleosides include abasic nucleosides, which lack a nucleobase.

[0133] “Oligomeric agent” means an oligomeric compound and optionally one or more additional features, such as a second oligomeric compound. An oligomeric agent may be a single-stranded oligomeric compound or may be an oligomeric duplex formed by two complementary oligomeric compounds.

[0134] “Oligomeric compound” means an oligonucleotide and optionally one or more additional features, such as a conjugate group or terminal group. An oligomeric compound may be paired with a second oligomeric compound that is complementary to the first oligomeric compound or may be unpaired. A “singled-stranded oligomeric compound” is an unpaired oligomeric compound.

[0135] “Oligomeric duplex” means a duplex formed by two oligomeric compounds having complementary nucleobase sequences.

[0136] “Oligonucleotide” means a strand of linked nucleosides connected via internucleoside linkages, wherein each nucleoside and internucleoside linkage may be modified or unmodified. Unless otherwise indicated, oligonucleotides consist of 8-50 linked nucleosides. As used herein, “modified oligonucleotide” means an oligonucleotide, wherein at least one nucleoside or internucleoside linkage is modified. As used herein, “unmodified oligonucleotide” means an oligonucleotide that does not comprise any nucleoside modifications or internucleoside modifications. “Parent oligonucleotide” means an oligonucleotide having a nucleobase sequence that is used as the basis of design for more oligonucleotides of similar sequence but with different lengths, motifs, and/or chemistries. The newly designed oligonucleotides may have the same or overlapping sequence as the parent oligonucleotide.

[0137] “Pharmaceutically acceptable carrier or diluent” means any substance suitable for use in administering to a subject. For example, a pharmaceutically acceptable carrier can be a sterile aqueous solution, such as PBS or water-for-injection.

[0138] “Pharmaceutically acceptable salts” means physiologically and pharmaceutically acceptable salts of compounds, such as oligomeric compounds or oligonucleotides, i.e., salts that retain the desired biological activity of the parent compound and do not impart undesired toxicological effects thereto.

[0139] “Pharmaceutical agent” means a compound that provides a therapeutic benefit when administered to a subject.

[0140] “Pharmaceutical composition” means a mixture of substances suitable for administering to a subject.

[0141] For example, a pharmaceutical composition may comprise one or more compounds or salt thereof and a sterile aqueous solution.

[0142] “Phosphorothioate linkage” means a modified phosphate linkage in which one of the non-bridging oxygen atoms is replaced with a sulfur atom. A phosphorothioate internucleoside linkage is a modified internucleoside linkage.

[0143] “Phosphorus moiety” means a group of atoms comprising a phosphorus atom. In certain embodiments, a phosphorus moiety comprises a mono-, di-, or tri-phosphate, or phosphorothioate.

[0144] “Portion” means a defined number of contiguous (i.e., linked) nucleobases of a nucleic acid. In certain embodiments, a portion is a defined number of contiguous nucleobases of a target nucleic acid. In certain embodiments, a portion is a defined number of contiguous nucleobases of an oligomeric compound.

[0145] “Prodrug” means a compound in a form outside the body which, when administered to a subject, is metabolized to another form within the body or cells thereof. In certain embodiments, the metabolized form is the active, or more active, form of the compound (e.g., drug). Typically conversion of a prodrug within the body is facilitated by the action of an enzyme(s) (e.g., endogenous or viral enzyme) or chemical(s) present in cells or tissues, and/or by physiologic conditions.

[0146] “Pulmonary disease” or “Pulmonary disorder” means a condition of the lung that reduces lung function, such as inhalation and/or exhalation. Pulmonary diseases and disorders can be caused by a genetic mutation, an infection, an injury, exposure to an environmental toxin, or a combination thereof.

[0147] “Reduce” means to bring down to a smaller extent, size, amount, or number. In certain embodiments, NOX4 (RNA or protein) is reduced in a cell or individual that is contacted or treated with a NOX4-specific inhibitor, respectively, relative to a cell or individual that is not contacted or treated with a NOX4-specific inhibitor, respectively.

[0148] “RNAi agent” means an antisense agent that acts, at least in part, through RISC or Ago2 to modulate a target nucleic acid and/or protein encoded by a target nucleic acid. RNAi agents include, but are not limited to double-stranded siRNA, single-stranded RNAi (ssRNAi), and microRNA, including microRNA mimics.

[0149] RNAi agents may comprise conjugate groups and/or terminal groups. In certain embodiments, an RNAi agent modulates the amount and/or activity, of a target nucleic acid. The term RNAi agent excludes antisense agents that act through RNase H.

[0150] “RNase H agent” means an antisense agent that acts through RNase H to modulate a target nucleic acid and/or protein encoded by a target nucleic acid. In certain embodiments, RNase H agents are single-stranded. In certain embodiments, RNase H agents are double-stranded. RNase H compounds may comprise conjugate groups and/or terminal groups. In certain embodiments, an RNase H agent modulates the amount and/or activity of a target nucleic acid. The term RNase H agent excludes antisense agents that act principally through RISC/Ago2.

[0151] “RefSeq No.” is a unique combination of letters and numbers assigned to a sequence to indicate the sequence is for a particular target transcript (e.g., target gene). Such sequence and information about the target gene (collectively, the gene record) can be found in a genetic sequence database. Genetic sequence databases include the NCBI Reference Sequence database, GenBank, the European Nucleotide Archive, and the DNA Data Bank of Japan (the latter three forming the International Nucleotide Sequence Database Collaboration or INSDC).

[0152] “Region” is defined as a portion of the target nucleic acid having at least one identifiable structure, function, or characteristic.

[0153] “Segments” are defined as smaller or sub-portions of regions within a nucleic acid.

[0154] “Single-stranded” in reference to an antisense agent means the antisense agent has only one oligonucleotide. “Self-complementary” means an oligonucleotide that at least partially hybridizes to itself. A compound consisting of one oligonucleotide, wherein the oligonucleotide of the compound is self-complementary, is a single-stranded compound. A single-stranded compound may be capable of binding to a complementary compound to form a duplex.

[0155] “Sites,” are defined as unique nucleobase positions within a target nucleic acid.

[0156] “Specifically hybridizable” and “specific hybridization” refers to an oligonucleotide having a sufficient degree of complementarity between the oligonucleotide and a target nucleic acid to induce a desired effect, while exhibiting minimal or no effects on non-target nucleic acids. In certain embodiments, specific hybridization occurs under physiological conditions.

[0157] “Specifically inhibit” a target nucleic acid means to reduce or block expression of the target nucleic acid while exhibiting fewer, minimal, or no effects on non-target nucleic acids reduction and does not necessarily indicate a total elimination of the target nucleic acid's expression.

[0158] “Subject” means a human or non-human subject selected for treatment or therapy.

[0159] “Sugar moiety” means an unmodified sugar moiety or a modified sugar moiety. “Unmodified sugar moiety” or “unmodified sugar” means a 2′-OH(H) furanosyl moiety, as found in RNA (an “unmodified RNA sugar moiety”), or a 2′-H(H) moiety, as found in DNA (an “unmodified DNA sugar moiety”). Unmodified sugar moieties have one hydrogen at each of the 1′, 3′, and 4′ positions, an oxygen at the 3′ position, and two hydrogens at the 5′ position. “Modified sugar moiety” or “modified sugar” means a modified furanosyl sugar moiety or a sugar surrogate. “Modified furanosyl sugar moiety” means a furanosyl sugar comprising a non-hydrogen substituent in place of at least one hydrogen of an unmodified sugar moiety. In certain embodiments, a modified furanosyl sugar moiety is a 2′-substituted sugar moiety. Such modified furanosyl sugar moieties include bicyclic sugars and non-bicyclic sugars.

[0160] “Sugar surrogate” means a modified sugar moiety having other than a furanosyl moiety that can link a nucleobase to another group, such as an internucleoside linkage, conjugate group, or terminal group in an oligonucleotide. Modified nucleosides comprising sugar surrogates can be incorporated into one or more positions within an oligonucleotide and such oligonucleotides are capable of hybridizing to complementary oligomeric compounds or nucleic acids.

[0161] As used herein, “symptom or hallmark” means any physical feature or test result that indicates the existence or extent of a disease or disorder. In certain embodiments, a symptom is apparent to a subject or to a medical professional examining or testing said subject. In certain embodiments, a hallmark is apparent upon invasive diagnostic testing, including, but not limited to, post-mortem tests.

[0162] “Target gene” refers to a gene encoding a target.

[0163] “Targeting” and “targeted” means specific hybridization of an antisense agent, antisense compound that, or oligonucleotide to a target nucleic acid in order to induce a desired effect.

[0164] “Target nucleic acid,” “target RNA,” “target RNA transcript” and “nucleic acid target” all mean a nucleic acid capable of being targeted by compounds described herein. Target RNA means an RNA transcript and includes pre-mRNA and mature mRNA unless otherwise specified.

[0165] “Target region” means a portion of a target nucleic acid to which one or more compounds is targeted.

[0166] “Target segment” means the sequence of nucleotides of a target nucleic acid to which a compound described herein is targeted. “5′ target site” refers to the 5′-most nucleotide of a target segment. “3′ target site” refers to the 3′-most nucleotide of a target segment.

[0167] “Terminal group” means a chemical group or group of atoms that is covalently linked to a terminus of an oligonucleotide.

[0168] “Therapeutically effective amount” means an amount of a compound, pharmaceutical agent, or composition that provides a therapeutic benefit to a subject.

[0169] “Treat” refers to administering a compound or pharmaceutical composition to a subject in order to effect an alteration or improvement of a disease, disorder, or condition in the subject. In certain embodiments, treating a subject improves a symptom relative to the same symptom in the absence of the treatment. In certain embodiments, treatment reduces the severity or frequency of a symptom, or delays the onset of a symptom, slows the progression of a symptom, or slows the severity or frequency of a symptom.

### Certain Embodiments

[0170] Certain embodiments provide methods, NOX4-specific inhibitors, and compositions for treating a pulmonary disease condition, or a symptom thereof, in a subject by administering the compound or composition to the subject. Inhibition of NOX4 can lead to a decrease of NOX4 level or expression in order to treat a pulmonary disease or disorder, or a symptom thereof. In certain embodiments, NOX4-specific inhibitors are antisense agents, single-stranded antisense agents, double-stranded antisense agents, RNAi agents, RNase H agents, double-stranded siRNA, single-stranded RNAi (ssRNAi), microRNA, antisense compounds, oligonucleotides, peptides, antibodies, small molecules, and other agents capable of inhibiting the expression or activity of NOX4. In certain embodiments, the subject is human. In certain embodiments, the antisense agent or RNAi agent comprises ribonucleotides and is double-stranded. In certain embodiments, the antisense agent, single-stranded antisense agent, double-stranded antisense agent, RNAi agent, RNase H agent, double-stranded siRNA, single-stranded RNAi (ssRNAi), microRNA, or antisense compound comprises a modified oligonucleotide.

[0171] In any of the foregoing embodiments, the modified oligonucleotide consists of 8 to 80, 10 to 30, 12 to 50, 13 to 30, 13 to 50, 14 to 30, 14 to 50, 15 to 30, 15 to 50, 16 to 30, 16 to 50, 17 to 30, 17 to 50, 18 to 20, 18 to 22, 18 to 24, 18 to 30, 18 to 50, 19 to 22, 19 to 30, 19 to 50, or 20 to 30 linked nucleosides.

[0172] In certain embodiments, at least one internucleoside linkage of said modified oligonucleotide is a modified internucleoside linkage. In certain embodiments, at least one internucleoside linkage is a phosphorothioate internucleoside linkage. In certain embodiments, the internucleoside linkages are phosphorothioate linkages and phosphate ester linkages.

[0173] In certain embodiments, any of the foregoing oligonucleotides comprises at least one modified sugar. In certain embodiments, at least one modified sugar comprises a 2′-O-methoxyethyl group. In certain embodiments, at least one modified sugar is a bicyclic sugar, such as a 4′-CH(CH₃)—O-2′ group, a 4′-CH₂—O-2′ group, or a 4′-(CH₂)₂—O-2′ group. In certain embodiments, at least one modified sugar comprises a 2′-F group or a 2′-OMe group.

[0174] In certain embodiments, at least one nucleoside of said modified oligonucleotide comprises a modified nucleobase. In certain embodiments, the modified nucleobase is a 5-methylcytosine.

[0175] In certain embodiments, a compound or composition comprises a modified oligonucleotide comprising: a) a gap segment consisting of linked deoxynucleosides; b) a 5′ wing segment consisting of linked nucleosides; and c) a 3′ wing segment consisting of linked nucleosides. The gap segment is positioned between the 5′ wing segment and the 3′ wing segment and each nucleoside of each wing segment comprises a modified sugar. In certain embodiments, at least one internucleoside linkage is a phosphorothioate linkage. In certain embodiments, and at least one cytosine is a 5-methylcytosine.

[0176] In certain embodiments, the compounds or compositions disclosed herein further comprise a pharmaceutically acceptable carrier or diluent.

[0177] In certain embodiments, NOX4-specific inhibitors can be used in methods of inhibiting expression of NOX4 in a cell. In certain embodiments, NOX4-specific inhibitors can be used in methods of treating a pulmonary disease or disorder including, but not limited to, chronic obstructive pulmonary disease or pulmonary hypertension.

### Certain Indications

[0178] Certain embodiments provided herein relate to methods of inhibiting NOX4 expression or activity, which can be useful for treating a disease associated with NOX4 in a subject, such as COPD or PH, by administration of a NOX4-specific inhibitor.

[0179] In certain embodiments, a method of inhibiting expression or activity of NOX4 in a cell comprises contacting the cell with a compound or composition comprising a NOX4-specific inhibitor, thereby inhibiting expression or activity of NOX4 in the cell. In certain embodiments, the cell is a lung cell. In certain embodiments, the cell is in the lung. In certain embodiments, the cell is in the lung of a subject who has, or is at risk of having a disease, disorder, condition, symptom, or physiological marker associated with a pulmonary disease or disorder. In certain embodiments, the pulmonary disease or disorder is chronic obstructive pulmonary disease or pulmonary hypertension. In certain embodiments, the NOX4-specific inhibitor is an antisense agent, single-stranded antisense agent, double-stranded antisense agent, RNAi agent, RNase H agent, double-stranded siRNA, single-stranded RNAi (ssRNAi), microRNA, antisense compound, peptide, antibody, small molecule or other agent capable of inhibiting the expression or activity of the NOX4. In certain embodiments, the antisense agent, single-stranded antisense agent, double-stranded antisense agent, RNAi agent, RNase H agent, double-stranded siRNA, single-stranded RNAi (ssRNAi), microRNA, or antisense compound comprises a modified oligonucleotide consisting of 8 to 80 linked nucleosides. In certain embodiments, the modified oligonucleotide consists of 10 to 30 linked nucleosides. In certain embodiments, the modified oligonucleotide consists of 16 to 20 linked nucleosides. In certain embodiments, the modified oligonucleotide consists of 18 to 20 linked nucleosides. In certain embodiments, the antisense agent comprises a single-stranded modified oligonucleotide and is a single-stranded antisense agent. In certain embodiments, the antisense agent comprises a double-stranded modified oligonucleotide and is a double-stranded antisense agent. In certain embodiments, the double-stranded antisense agent comprises an antisense compound and a sense compound. In certain embodiments, the antisense agent is a double-stranded siRNA targeted to NOX4.

[0180] In certain embodiments, a method of treating one or more diseases, disorders, conditions, symptoms or physiological markers associated with NOX4 comprises administering to the subject a NOX4-specific inhibitor. In certain embodiments, a method of treating a disease, disorder, condition, symptom, or physiological marker associated with a pulmonary disease or disorder in a subject comprises administering to the subject a NOX4-specific inhibitor, thereby treating the disease. In certain embodiments, the subject is identified as having, or at risk of having, the disease, disorder, condition, symptom or physiological marker.

[0181] In certain embodiments, the pulmonary disease or disorder is COPD or PH. In certain embodiments, the NOX4-specific inhibitor is administered to the subject by aerosolized delivery. In certain embodiments, the NOX4-specific inhibitor is administered via a nebulizer or inhaler. In certain embodiments, the NOX4-specific inhibitor is administered via a nebulizer or inhaler, wherein the NOX4-inhibitor is administered as a mixture comprising, or in the presence of, a pharmaceutically acceptable excipient. In certain embodiments, the subject is human. In certain embodiments, the NOX4-specific inhibitor is an antisense agent, single-stranded antisense agent, double-stranded antisense agent, RNAi agent, RNase H agent, double-stranded siRNA, single-stranded RNAi (ssRNAi), microRNA, antisense compound, peptide, antibody, small molecule or other agent capable of inhibiting the expression or activity of the NOX4. In certain embodiments, the antisense agent, single-stranded antisense agent, double-stranded antisense agent, RNAi agent, RNase H agent, double-stranded siRNA, single-stranded RNAi (ssRNAi), microRNA, or antisense compound comprises a modified oligonucleotide consisting of 8 to 80 linked nucleosides. In certain embodiments, the modified oligonucleotide consists of 10 to 30 linked nucleosides. In certain embodiments, the antisense agent comprises a single-stranded modified oligonucleotide and is a single-stranded antisense agent. In certain embodiments, the antisense agent comprises a double-stranded modified oligonucleotide and is a double-stranded antisense agent. In certain embodiments, the double-stranded antisense agent comprises an antisense compound and a sense compound. In certain embodiments, the antisense agent is a double-stranded siRNA targeted to NOX4.

[0182] In certain embodiments, a method of improving spirometry, lung function, oxygen saturation, or blood pressure, or a combination thereof, in a subject comprises administering to the subject a NOX4-specific inhibitor. In certain embodiments, spirometry, lung function, oxygen saturation, or blood pressure, or a combination thereof, is improved in a subject that is administered a NOX4-specific inhibitor, relative to spirometry, lung function, oxygen saturation, or blood pressure, or a combination thereof in the subject before administration. In certain embodiments, spirometry, lung function, oxygen saturation, or blood pressure, or a combination thereof, is reduced in a subject that is administered a NOX4-specific inhibitor, relative to spirometry, lung function, oxygen saturation, or blood pressure, or a combination thereof in a control subject that does not receive the NOX4-specific inhibitor. In certain embodiments, the subject is identified as having, or at risk of having a disease, disorder, condition, symptom, or physiological marker associated with a pulmonary disease or disorder. In certain embodiments, the pulmonary disease or disorder is COPD or PH. In certain embodiments, the NOX4-specific inhibitor is administered to the subject by aerosolized delivery. In certain embodiments, the NOX4-specific inhibitor is administered via a nebulizer or inhaler. In certain embodiments, the NOX4-specific inhibitor is administered via a nebulizer or inhaler, wherein the NOX4-inhibitor is administered as a mixture comprising, or in the presence of, a pharmaceutically acceptable excipient. In certain embodiments, the subject is human. In certain embodiments, the NOX4-specific inhibitor is an antisense agent, single-stranded antisense agent, double-stranded antisense agent, RNAi agent, RNase H agent, double-stranded siRNA, single-stranded RNAi (ssRNAi), microRNA, antisense compound, peptide, antibody, small molecule or other agent capable of inhibiting the expression or activity of the NOX4. In certain embodiments, the antisense agent, single-stranded antisense agent, double-stranded antisense agent, RNAi agent, RNase H agent, double-stranded siRNA, single-stranded RNAi (ssRNAi), microRNA, or antisense compound comprises a modified oligonucleotide consisting of 8 to 80 linked nucleosides. In certain embodiments, the modified oligonucleotide consists of 10 to 30 linked nucleosides. In certain embodiments, the modified oligonucleotide consists of 16 to 20 linked nucleosides. In certain embodiments, the modified oligonucleotide consists of 18 to 20 linked nucleosides. In certain embodiments, the antisense agent comprises a single-stranded modified oligonucleotide and is a single-stranded antisense agent. In certain embodiments, the antisense agent comprises a double-stranded modified oligonucleotide and is a double-stranded antisense agent. In certain embodiments, the double-stranded antisense agent comprises an antisense compound and a sense compound. In certain embodiments, the antisense agent is a double-stranded siRNA targeted to NOX4.

[0183] Certain embodiments are drawn to compounds and compositions described herein for use in therapy. Certain embodiments are drawn to a compound or composition comprising a NOX4-specific inhibitor for use in treating one or more diseases, disorders, conditions, symptoms or physiological markers associated with NOX4. Certain embodiments are drawn to a compound or composition for use in treating a pulmonary disease or disorder, or a symptom or physiological marker thereof. In certain embodiments, the pulmonary disease or disorder is COPD or PH. In certain embodiments, the NOX4-specific inhibitor is an antisense agent, single-stranded antisense agent, double-stranded antisense agent, RNAi agent, RNase H agent, double-stranded siRNA, single-stranded RNAi (ssRNAi), microRNA, antisense compound, peptide, antibody, small molecule or other agent capable of inhibiting the expression or activity of the NOX4. In certain embodiments, the antisense agent, single-stranded antisense agent, double-stranded antisense agent, RNAi agent, RNase H agent, double-stranded siRNA, single-stranded RNAi (ssRNAi), microRNA, or antisense compound comprises a modified oligonucleotide consisting of 8 to 80 linked nucleosides. In certain embodiments, the modified oligonucleotide consists of 10 to 30 linked nucleosides. In certain embodiments, the modified oligonucleotide consists of 16 to 20 linked nucleosides. In certain embodiments, the modified oligonucleotide consists of 18 to 20 linked nucleosides. In certain embodiments, the antisense agent comprises a single-stranded modified oligonucleotide and is a single-stranded antisense agent. In certain embodiments, the antisense agent comprises a double-stranded modified oligonucleotide and is a double-stranded antisense agent. In certain embodiments, the double-stranded antisense agent comprises an antisense compound and a sense compound. In certain embodiments, the antisense agent is a double-stranded siRNA targeted to NOX4.

[0184] Certain embodiments are drawn to a NOX4-specific inhibitor or composition comprising a NOX4-specific inhibitor for use in improving spirometry, lung function, oxygen saturation, or blood pressure, or a combination thereof, in a subject. In certain embodiments, spirometry, lung function, oxygen saturation, or blood pressure, or a combination thereof, is improved in a subject that is administered a NOX4-specific inhibitor, relative to spirometry, lung function, oxygen saturation, or blood pressure, or a combination thereof in the subject before administration. In certain embodiments, spirometry, lung function, oxygen saturation, or blood pressure, or a combination thereof, is reduced in a subject that is administered a NOX4-specific inhibitor, relative to spirometry, lung function, oxygen saturation, or blood pressure, or a combination thereof in a control subject that does not receive the NOX4-specific inhibitor. In certain embodiments, the compound or composition is provided for use in improving spirometry in the subject. In certain embodiments, the NOX4-specific inhibitor or composition is provided for use in improving lung function in the subject. In certain embodiments, the compound or composition is provided for use in improving oxygen saturation in the subject. In certain embodiments, the NOX4-specific inhibitor or composition is provided for use in improving blood pressure in the subject. In certain embodiments, the subject is identified as having, or at risk of having a disease, disorder, condition, symptom, or physiological marker associated with a pulmonary disease or disorder. In certain embodiments, the pulmonary disease or disorder is COPD or PH. In certain embodiments, the subject is a human subject. In certain embodiments, the NOX4-specific inhibitor is an antisense agent, single-stranded antisense agent, double-stranded antisense agent, RNAi agent, RNase H agent, double-stranded siRNA, single-stranded RNAi (ssRNAi), microRNA, antisense compound, peptide, antibody, small molecule or other agent capable of inhibiting the expression or activity of the NOX4. In certain embodiments, the antisense agent, single-stranded antisense agent, double-stranded antisense agent, RNAi agent, RNase H agent, double-stranded siRNA, single-stranded RNAi (ssRNAi), microRNA, or antisense compound comprises a modified oligonucleotide consisting of 8 to 80 linked nucleosides. In certain embodiments, the modified oligonucleotide consists of 10 to 30 linked nucleosides. In certain embodiments, the modified oligonucleotide consists of 16 to 20 linked nucleosides. In certain embodiments, the modified oligonucleotide consists of 18 to 20 linked nucleosides. In certain embodiments, the antisense agent comprises a single-stranded modified oligonucleotide and is a single-stranded antisense agent. In certain embodiments, the antisense agent comprises a double-stranded modified oligonucleotide and is a double-stranded antisense agent. In certain embodiments, the double-stranded antisense agent comprises an antisense compound and a sense compound. In certain embodiments, the antisense agent is a double-stranded siRNA targeted to NOX4.

[0185] Certain embodiments are drawn to use of NOX4-specific inhibitors or compositions described herein for the manufacture or preparation of a medicament for therapy. Certain embodiments are drawn to the use of a NOX4-specific inhibitor or composition as described herein in the manufacture or preparation of a medicament for treating one or more diseases, disorders, conditions, symptoms or physiological markers associated with NOX4. In certain embodiments, the compound or composition as described herein is used in the manufacture or preparation of a medicament for treating a pulmonary disease or disorder, or a symptom or physiological marker thereof. In certain embodiments, the pulmonary disease or disorder is COPD or PH. In certain embodiments, the NOX4-specific inhibitor is an antisense agent, single-stranded antisense agent, double-stranded antisense agent, RNAi agent, RNase H agent, double-stranded siRNA, single-stranded RNAi (ssRNAi), microRNA, antisense compound, peptide, antibody, small molecule or other agent capable of inhibiting the expression or activity of the NOX4. In certain embodiments, the antisense agent, single-stranded antisense agent, double-stranded antisense agent, RNAi agent, RNase H agent, double-stranded siRNA, single-stranded RNAi (ssRNAi), microRNA, or antisense compound comprises a modified oligonucleotide consisting of 8 to 80 linked nucleosides. In certain embodiments, the modified oligonucleotide consists of 10 to 30 linked nucleosides. In certain embodiments, the modified oligonucleotide consists of 16 to 20 linked nucleosides. In certain embodiments, the modified oligonucleotide consists of 18 to 20 linked nucleosides. In certain embodiments, the antisense agent comprises a single-stranded modified oligonucleotide and is a single-stranded antisense agent. In certain embodiments, the antisense agent comprises a double-stranded modified oligonucleotide and is a double-stranded antisense agent. In certain embodiments, the double-stranded antisense agent comprises an antisense compound and a sense compound. In certain embodiments, the antisense agent is a double-stranded siRNA targeted to NOX4.

[0186] Certain embodiments are drawn to the use of a NOX4-specific inhibitor or composition for the manufacture or preparation of a medicament for improving spirometry, lung function, oxygen saturation, or blood pressure, or a combination thereof, in a subject having or at risk of having a pulmonary disease or disorder. Certain embodiments are drawn to use of a NOX4-specific inhibitor or composition in the manufacture or preparation of a medicament for improving spirometry in the subject. Certain embodiments are drawn to use of a NOX4-specific inhibitor in the manufacture or preparation of a medicament for improving lung function in the subject. Certain embodiments are drawn to use of a NOX4-specific inhibitor in the manufacture or preparation of a medicament for improving oxygen saturation in the subject. Certain embodiments are drawn to use of a NOX4-specific inhibitor in the manufacture or preparation of a medicament for improving blood pressure in the subject. In certain embodiments, the compound or composition comprises an antisense agent, single-stranded antisense agent, double-stranded antisense agent, RNAi agent, RNase H agent, double-stranded siRNA, single-stranded RNAi (ssRNAi), microRNA, antisense compound, peptide, antibody, small molecule or other agent capable of inhibiting the expression or activity of the NOX4. In certain embodiments, the antisense agent, single-stranded antisense agent, double-stranded antisense agent, RNAi agent, RNase H agent, double-stranded siRNA, single-stranded RNAi (ssRNAi), microRNA, or antisense compound comprises a modified oligonucleotide consisting of 8 to 80 linked nucleosides. In certain embodiments, the modified oligonucleotide consists of 10 to 30 linked nucleosides. In certain embodiments, the modified oligonucleotide consists of 16 to 20 linked nucleosides. In certain embodiments, the modified oligonucleotide consists of 18 to 20 linked nucleosides. In certain embodiments, the antisense agent comprises a single-stranded modified oligonucleotide and is a single-stranded antisense agent. In certain embodiments, the antisense agent comprises a double-stranded modified oligonucleotide and is a double-stranded antisense agent. In certain embodiments, the double-stranded antisense agent comprises an antisense compound and a sense compound. In certain embodiments, the antisense agent is a double-stranded siRNA targeted to NOX4.

[0187] In any of the foregoing methods or uses, the antisense agent can comprise an antisense compound targeted to NOX4. In certain embodiments, the antisense compound comprises an oligonucleotide, for example an oligonucleotide consisting of 8 to 80 linked nucleosides, 10 to 30 linked nucleosides, 12 to 30 linked nucleosides, 16 to 20 linked nucleosides, 18 to 20 linked nucleosides, or 20 linked nucleosides. In certain embodiments, the oligonucleotide comprises at least one modified internucleoside linkage, at least one modified sugar and/or at least one modified nucleobase. In certain embodiments, the modified internucleoside linkage is a phosphorothioate internucleoside linkage, the modified sugar is a bicyclic sugar or a 2′-O-methoxyethyl, and the modified nucleobase is a 5-methylcytosine. In certain embodiments, the modified oligonucleotide comprises a gap segment consisting of linked deoxynucleosides; a 5′ wing segment consisting of linked nucleosides; and a 3′ wing segment consisting of linked nucleosides, wherein the gap segment is positioned immediately adjacent to and between the 5′ wing segment and the 3′ wing segment and wherein each nucleoside of each wing segment comprises a modified sugar. In certain embodiments, the modified oligonucleotide comprises a gap segment consisting of linked deoxynucleosides; a 5′-region consisting of linked nucleosides; and a 3′-region consisting of linked nucleosides, wherein the gap segment is positioned immediately adjacent to and between the 5′-region and the 3′-region, wherein the 3′-most nucleoside of the 5′-region and the 5′-most nucleoside of the 3′-region comprise modified sugar moieties.

[0188] In certain embodiments, the antisense agent is single-stranded. In certain embodiments, the antisense agent is double-stranded. In certain embodiments, the modified oligonucleotide consists of 12 to 30 linked nucleosides. In certain embodiments, compositions disclosed herein comprise an antisense agent described herein and a pharmaceutically acceptable carrier or diluent.

[0189] In any of the foregoing methods or uses, the compound or composition may comprise or consists of a modified oligonucleotide 12 to 30 linked nucleosides in length, wherein the modified oligonucleotide comprises:
[0190] a gap segment consisting of linked 2′-deoxynucleosides;
[0191] a 5′ wing segment consisting of linked nucleosides; and
[0192] a 3′ wing segment consisting of linked nucleosides;
[0193] wherein the gap segment is positioned between the 5′ wing segment and the 3′ wing segment and wherein each nucleoside of each wing segment comprises a modified sugar.

[0194] In any of the foregoing methods or uses, the compound or composition may comprise or consists of a modified oligonucleotide 12 to 30 linked nucleosides in length, wherein the modified oligonucleotide comprises:
[0195] a central region consisting of 6-10 linked central region nucleosides;
[0196] a 5′-region consisting of 1-6 linked 5′-region nucleosides; and
[0197] a 3′-region consisting of 1-6 linked 3′-region nucleosides;
   [0198] wherein the 3′-most nucleoside of the 5′-region and the 5′-most nucleoside of the 3′-region comprise modified sugar moieties, and
   [0199] each of the central region nucleosides is selected from a nucleoside comprising a 2′-β-D-deoxyribosyl sugar moiety and a nucleoside comprising a 2′-substituted sugar moiety, wherein the central region comprises at least six nucleosides comprising a 2′-β-D-deoxyribosyl sugar moiety and no more than two nucleosides comprise a 2′-substituted sugar moiety. In certain embodiments, each of the central region nucleosides comprises a 2′-β-D-deoxyribosyl sugar moiety. In certain embodiments, each of the 5′-region nucleosides comprises a modified sugar moiety. In certain embodiments, each of the 3′-region nucleosides comprises a modified sugar moiety. In certain embodiments, each of the 5′-region nucleosides and each of the 3′-region nucleosides comprises a modified sugar moiety. In certain embodiments, one or more of the 5′-region nucleosides comprises a 2′-β-D-deoxyribosyl sugar moiety. In certain embodiments, one or more of the 5′-region nucleosides comprises a 2′-β-D-deoxyribosyl sugar moiety.

[0200] In any of the foregoing methods or uses, the compound or composition can be administered via inhalation. Certain embodiments provide compounds or compositions suitable for aerosolization and/or dispersal by a nebulizer or inhaler. In certain embodiments, the compound or composition is a solid comprising particles of compounds that are of respirable size. A solid particulate composition can optionally contain a dispersant which serves to facilitate the formation of an aerosol, e.g., lactose. Solid pharmaceutical compositions comprising an oligonucleotide can also be aerosolized using any solid particulate medicament aerosol generator known in the art, e.g., a dry powder inhaler. In certain embodiments, the powder employed in the inhaler consists of the compound comprising the active compound or of a powder blend comprising the active compound, a suitable powder diluent, and an optional surfactant. In certain embodiments, the pharmaceutical composition is a liquid. In certain such embodiments, the liquid is administered as an aerosol that is produced by any suitable means, such as with a nebulizer or inhaler. See, e.g., U.S. Pat. No. 4,501,729. In certain embodiments, the nebulizer is a device for producing a spray of liquid. Nebulizers are devices that transform solutions or suspensions into an aerosol mist and are well known in the art. Suitable nebulizers include jet nebulizers, ultrasonic nebulizers, electronic mesh nebulizers, and vibrating mesh nebulizers. In certain embodiments, the nebulizer is activated manually by squeezing a flexible bottle that contains the pharmaceutical composition. In certain embodiments, the aerosol is produced by a metered dose inhaler, which typically contains a suspension or solution formulation of the active compound in a liquefied propellant. Pharmaceutical compositions suitable for aerosolization can comprise propellants, surfactants, co-solvents, dispersants, preservatives, and/or other additives or excipients. Examples of pharmaceutically acceptable excipients have been described previously (for example, Pilcer and Amighi, Int. J. Pharmaceutics, 2010, 392, 1-19).

### Certain Compounds

[0201] In certain embodiments, antisense agents described herein comprise antisense compounds. In certain embodiments, the antisense compound comprises a modified oligonucleotide. In certain embodiments, the modified oligonucleotide has a nucleobase sequence complementary to that of a target nucleic acid.

[0202] In certain embodiments, an antisense agent described herein comprises or consists of a modified oligonucleotide. In certain embodiments, the modified oligonucleotide has a nucleobase sequence complementary to that of a target nucleic acid.

[0203] In certain embodiments, an antisense agent is single-stranded. In certain embodiments, a single-stranded antisense agent comprises or consists of an antisense compound. In certain embodiments, such an antisense compound comprises or consists of an oligonucleotide. In certain embodiments, the oligonucleotide is an antisense oligonucleotide. In certain embodiments, the oligonucleotide is modified. In certain embodiments, the oligonucleotide of a single-stranded antisense agent or antisense compound comprises a self-complementary nucleobase sequence. In certain embodiments, a single-stranded antisense agent comprises an antisense compound, which comprises a modified oligonucleotide and a conjugate group.

[0204] In certain embodiments, antisense agents are double-stranded. In certain embodiments, double-stranded antisense agents comprise a first modified oligonucleotide having a region complementary to a target nucleic acid and a second modified oligonucleotide having a region complementary to the first modified oligonucleotide. In certain embodiments, the modified oligonucleotide is an RNA oligonucleotide.

[0205] In such embodiments, the thymine nucleobase in the modified oligonucleotide is replaced by a uracil nucleobase. In certain embodiments, a double-stranded antisense agent comprises a conjugate group. In certain embodiments, a double-stranded antisense agent comprises an antisense compound and a sense compound, wherein the sense compound comprises a conjugate group. In certain embodiments, each modified oligonucleotide is 12-30 linked nucleosides in length.

[0206] Examples of single-stranded and double-stranded antisense agents include but are not limited to oligonucleotides, siRNAs, microRNA targeting oligonucleotides, and single-stranded RNAi compounds, such as small hairpin RNAs (shRNAs), single-stranded siRNAs (ssRNAs), and microRNA mimics.

[0207] In certain embodiments, an antisense agent described herein comprises an oligonucleotide having a nucleobase sequence that, when written in the 5′ to 3′ direction, comprises the reverse complement of the target segment of a target nucleic acid to which it is targeted.

[0208] In certain embodiments, an antisense agent, antisense compound, or sense compound described herein comprises an oligonucleotide consisting of 10 to 30 linked nucleosides. In certain embodiments, the oligonucleotide consists of 12 to 30 linked nucleosides. In certain embodiments, the oligonucleotide consists of 12 to 22 linked nucleosides. In certain embodiments, the oligonucleotide consists of 14 to 30 linked nucleosides. In certain embodiments, the oligonucleotide consists of 14 to 20 linked nucleosides. In certain embodiments, the oligonucleotide consists of 15 to 30 linked nucleosides. In certain embodiments, the oligonucleotide consists of 15 to 20 linked nucleosides. In certain embodiments, the oligonucleotide consists of 16 to 30 linked nucleosides. In certain embodiments, the oligonucleotide consists of 16 to 20 linked nucleosides. In certain embodiments, the oligonucleotide consists of 17 to 30 linked nucleosides. In certain embodiments, the oligonucleotide consists of 17 to 20 linked nucleosides. In certain embodiments, the oligonucleotide consists of 18 to 30 linked nucleosides. In certain embodiments, the oligonucleotide consists of 18 to 21 linked nucleosides. In certain embodiments, the oligonucleotide consists of 18 to 20 linked nucleosides. In certain embodiments, the oligonucleotide consists of 20 to 30 linked nucleosides. In certain embodiments, oligonucleotides consist of 12 to 30 linked nucleosides, 14 to 30 linked nucleosides, 14 to 20 linked nucleosides, 15 to 30 linked nucleosides, 15 to 20 linked nucleosides, 16 to 30 linked nucleosides, 16 to 20 linked nucleosides, 17 to 30 linked nucleosides, 17 to 20 linked nucleosides, 18 to 30 linked nucleosides, 18 to 20 linked nucleosides, 18 to 21 linked nucleosides, 20 to 30 linked nucleosides, or 12 to 22 linked nucleosides. In certain embodiments, an oligonucleotide consists of 14 linked nucleosides. In certain embodiments, an oligonucleotide consists of 16 linked nucleosides. In certain embodiments, an oligonucleotide consists of 17 linked nucleosides. In certain embodiments, an oligonucleotide consists of 18 linked nucleosides. In certain embodiments, an oligonucleotide consists of 19 linked nucleosides. In certain embodiments, an oligonucleotide consists of 20 linked nucleosides. In other embodiments, an oligonucleotide consists of 8 to 80, 12 to 50, 13 to 30, 13 to 50, 14 to 30, 14 to 50, 15 to 30, 15 to 50, 16 to 30, 16 to 50, 17 to 30, 17 to 50, 18 to 22, 18 to 24, 18 to 30, 18 to 50, 19 to 22, 19 to 30, 19 to 50, or 20 to 30 linked nucleosides. In certain such embodiments, an oligonucleotide consists of 8, 9, 10, 11, 12, 13, 14, 15, 16, 17, 18, 19, 20, 21, 22, 23, 24, 25, 26, 27, 28, 29, 30, 31, 32, 33, 34, 35, 36, 37, 38, 39, 40, 41, 42, 43, 44, 45, 46, 47, 48, 49, 50, 51, 52, 53, 54, 55, 56, 57, 58, 59, 60, 61, 62, 63, 64, 65, 66, 67, 68, 69, 70, 71, 72, 73, 74, 75, 76, 77, 78, 79, or 80 linked nucleosides, or a range defined by any two of the above values. In certain embodiments, the oligonucleotide is a modified oligonucleotide. In certain embodiments, the oligonucleotide is an antisense oligonucleotide. In certain embodiments, the oligonucleotide is a sense oligonucleotide.

[0209] In certain embodiments, antisense agents described herein are interfering RNA compounds (RNAi), which include double-stranded RNA compounds (also referred to as short-interfering RNA or siRNA) and single-stranded RNAi compounds (or ssRNAi). Such compounds work at least in part through the RISC pathway to degrade and/or sequester a target nucleic acid (thus, include microRNA/microRNA-mimic compounds). As used herein, the term siRNA is meant to be equivalent to other terms used to describe nucleic acid molecules that are capable of mediating sequence specific RNAi, for example short interfering RNA (siRNA), double-stranded RNA (dsRNA), micro-RNA (miRNA), short hairpin RNA (shRNA), short interfering oligonucleotide, short interfering nucleic acid, short interfering modified oligonucleotide, chemically modified siRNA, post-transcriptional gene silencing RNA (ptgsRNA), and others. In addition, as used herein, the term RNAi is meant to be equivalent to other terms used to describe sequence specific RNA interference, such as post transcriptional gene silencing, translational inhibition, or epigenetics.

[0210] In certain embodiments, a double-stranded antisense agent comprises a first oligonucleotide comprising the nucleobase sequence complementary to a target region of a NOX4 nucleic acid and a second oligonucleotide. In certain embodiments, the double-stranded compound comprises ribonucleotides in which the first oligonucleotide has uracil (U) in place of thymine (T) and is complementary to a target region. In certain embodiments, a double-stranded compound comprises (i) a first oligonucleotide comprising a nucleobase sequence complementary to a target region of a NOX4 nucleic acid, and (ii) a second oligonucleotide. In certain embodiments, the double-stranded antisense agent comprises one or more modified nucleotides in which the 2′ position in the sugar contains a halogen (such as fluorine group; 2′-F) or contains an alkoxy group (such as a methoxy group; 2′-OMe). In certain embodiments, the double-stranded antisense agent comprises at least one 2′-F sugar modification and at least one 2′-OMe sugar modification. In certain embodiments, the at least one 2′-F sugar modification and at least one 2′-OMe sugar modification are arranged in an alternating pattern for at least 2, 3, 4, 5, 6, 7, 8, 9, 10, 11, 12, 13, 14, 15, 16, 17, 18, 19, or contiguous nucleobases along a strand of the dsRNA compound. In certain embodiments, the double-stranded antisense agent comprises one or more linkages between adjacent nucleotides other than a naturally-occurring phosphodiester linkage. Examples of such linkages include phosphoramide, phosphorothioate, and phosphorodithioate linkages. The double-stranded compounds may also be chemically modified nucleic acid molecules as taught in U.S. Pat. No. 6,673,661. In other embodiments, the dsRNA contains one or two capped strands, as disclosed, for example, by WO 00/63364, filed Apr. 19, 2000. In certain embodiments, the first oligonucleotide of the double-stranded antisense agent is an siRNA guide strand and the second oligonucleotide of the double-stranded compound is an siRNA passenger strand. In certain embodiments, the second oligonucleotide of the double-stranded antisense agent is complementary to the first oligonucleotide. In certain embodiments, each strand of the double-stranded antisense agent consists of 16, 17, 18, 19, 20, 21, 22, or 23 linked nucleosides.

[0211] In certain embodiments, a single-stranded antisense agent described herein can comprise any of the oligonucleotide sequences targeted to NOX4 described herein. In certain embodiments, such a single-stranded antisense agent is a single-stranded RNAi (ssRNAi) agent. In certain embodiments, a ssRNAi agent comprises the nucleobase sequence complementary to a target region of a NOX4 nucleic acid. In certain embodiments, the ssRNAi agent comprises ribonucleotides in which uracil (U) is in place of thymine (T). In certain embodiments, ssRNAi agent comprises a nucleobase sequence complementary to a target region of a NOX4 nucleic acid. In certain embodiments, a ssRNAi agent comprises one or more modified nucleotides in which the 2′ position in the sugar contains a halogen (such as fluorine group; 2′-F) or contains an alkoxy group (such as a methoxy group; 2′-OMe). In certain embodiments, a ssRNAi agent comprises at least one 2′-F sugar modification and at least one 2′-OMe sugar modification. In certain embodiments, the at least one 2′-F sugar modification and at least one 2′-OMe sugar modification are arranged in an alternating pattern for at least 2, 3, 4, 5, 6, 7, 8, 9, 10, 11, 12, 13, 14, 15, 16, 17, 18, 19, or 20 contiguous nucleobases along a strand of the ssRNAi agent. In certain embodiments, the ssRNAi agent comprises one or more linkages between adjacent nucleotides other than a naturally-occurring phosphodiester linkage. Examples of such linkages include phosphoramide, phosphorothioate, and phosphorodithioate linkages. The ssRNAi agents may also be chemically modified nucleic acid molecules as taught in U.S. Pat. No. 6,673,661. In other embodiments, the ssRNAi agent contains a capped strand, as disclosed, for example, by WO 00/63364, filed Apr. 19, 2000. In certain embodiments, the ssRNAi agent consists of 16, 17, 18, 19, 20, 21, 22, or 23 linked nucleosides.

[0212] In certain embodiments, antisense agents described herein comprise modified oligonucleotides. Certain modified oligonucleotides have one or more asymmetric center and thus give rise to enantiomers, diastereomers, and other stereoisomeric configurations that may be defined, in terms of absolute stereochemistry, as (R) or (S), as a or R such as for sugar anomers, or as (D) or (L) such as for amino acids etc. Included in the modified oligonucleotides provided herein are all such possible isomers, including their racemic and optically pure forms, unless specified otherwise. Likewise, all cis- and trans-isomers and tautomeric forms are also included.

### Certain Mechanisms

[0213] In certain embodiments, antisense agents described herein selectively affect one or more target nucleic acid. Such selective antisense agents comprise a nucleobase sequence that hybridizes to one or more target nucleic acid, resulting in one or more desired antisense activity and does not hybridize to one or more non-target nucleic acid or does not hybridize to one or more non-target nucleic acid in such a way that results in a significant undesired antisense activity.

[0214] In certain antisense activities, hybridization of an antisense agent described herein to a target nucleic acid results in recruitment of a protein that cleaves the target nucleic acid. For example, certain antisense agents described herein result in RNase H mediated cleavage of the target nucleic acid. RNase H is a cellular endonuclease that cleaves the RNA strand of an RNA:DNA duplex. The DNA in such an RNA:DNA duplex need not be unmodified DNA. In certain embodiments, antisense agents described herein are sufficiently “DNA-like” to elicit RNase H activity. Further, in certain embodiments, one or more non-DNA-like nucleoside in the gap of a gapmer is tolerated.

[0215] In certain antisense activities, antisense agents described herein or a portion of the antisense agent is loaded into an RNA-induced silencing complex (RISC), ultimately resulting in cleavage of the target nucleic acid. For example, certain antisense agents described herein result in cleavage of the target nucleic acid by Argonaute. In certain embodiments, antisense agents that are loaded into RISC are RNAi agents. RNAi agents may be double-stranded (siRNA) or single-stranded (ssRNAi).

[0216] In certain embodiments, hybridization of antisense agents described herein to a target nucleic acid does not result in recruitment of a protein that cleaves that target nucleic acid. In certain such embodiments, hybridization of the antisense agents to the target nucleic acid results in alteration of splicing of the target nucleic acid. In certain embodiments, hybridization of the antisense agents to a target nucleic acid results in inhibition of a binding interaction between the target nucleic acid and a protein or other nucleic acid. In certain such embodiments, hybridization of the antisense agents to a target nucleic acid results in alteration of translation of the target nucleic acid.

[0217] Antisense activities may be observed directly or indirectly. In certain embodiments, observation or detection of an antisense activity involves observation or detection of a change in an amount of a target nucleic acid or protein encoded by such target nucleic acid, a change in the ratio of splice variants of a nucleic acid or protein, and/or a phenotypic change in a cell or individual.

### Target Nucleic Acids, Target Regions and Nucleotide Sequences

[0218] In certain embodiments, antisense agents described herein comprise or consist of an oligonucleotide comprising a region that is complementary to a NOX4 nucleic acid.

[0219] Nucleotide sequences that encode NOX4 include, without limitation, the following RefSeq Nos.: GENBANK Accession No. NT_039433.8, truncated from nucleosides 4994000 to U.S. Pat. No. 5,149,000 (incorporated by reference, disclosed herein as SEQ ID NO: 1); GENBANK Accession No. NM_001285833.1 (incorporated by reference, disclosed herein as SEQ ID NO: 2); GENBANK Accession No. NM_015760.5 (incorporated by reference, disclosed herein as SEQ ID NO: 3), the complement of GENBANK Accession No. NT_033899.9 truncated from 1320000 to U.S. Pat. No. 1,588,000 (incorporated by reference, disclosed herein as SEQ ID NO: 4); and GENBANK Accession No. NM_016931.4 (incorporated by reference, disclosed herein as SEQ ID NO: 5).

### Hybridization

[0220] In some embodiments, hybridization occurs between an antisense agent disclosed herein and a NOX4 nucleic acid. The most common mechanism of hybridization involves hydrogen bonding (e.g., Watson-Crick, Hoogsteen or reversed Hoogsteen hydrogen bonding) between complementary nucleobases of the nucleic acid molecules.

[0221] Hybridization can occur under varying conditions. Hybridization conditions are sequence-dependent and are determined by the nature and composition of the nucleic acid molecules to be hybridized.

[0222] Methods of determining whether a sequence is specifically hybridizable to a target nucleic acid are well known in the art. In certain embodiments, the antisense agents provided herein are specifically hybridizable with a NOX4 nucleic acid.

### Complementarity

[0223] An oligonucleotide is said to be complementary to another nucleic acid when the nucleobase sequence of such oligonucleotide or one or more regions thereof matches the nucleobase sequence of another oligonucleotide or nucleic acid or one or more regions thereof when the two nucleobase sequences are aligned in opposing directions. Nucleobase matches or complementary nucleobases, as described herein, are limited to adenine (A) and thymine (T), adenine (A) and uracil (U), cytosine (C) and guanine (G), and 5-methylcytosine (mC) and guanine (G) unless otherwise specified. Complementary oligonucleotides and/or nucleic acids need not have nucleobase complementarity at each nucleoside and may include one or more nucleobase mismatches. An oligonucleotide is fully complementary or 100% complementary when such oligonucleotides have nucleobase matches at each nucleoside without any nucleobase mismatches.

[0224] In certain embodiments, antisense agents described herein comprise or consist of modified oligonucleotides. In certain embodiments, antisense agents described herein are antisense compounds. Non-complementary nucleobases between an oligonucleotide and a NOX4 nucleic acid may be tolerated provided that the oligonucleotide remains able to specifically hybridize to a target nucleic acid. Moreover, an oligonucleotide may hybridize over one or more segments of a NOX4 nucleic acid such that intervening or adjacent segments are not involved in the hybridization event (e.g., a loop structure, mismatch or hairpin structure).

[0225] In certain embodiments, an oligonucleotide provided herein, or a specified portion thereof, are, or are at least, 70%, 80%, 85%, 86%, 87%, 88%, 89%, 90%, 91%, 92%, 93%, 94%, 95%, 96%, 97%, 98%, 99%, or 100% complementary to a NOX4 nucleic acid, a target region, target segment, or specified portion thereof. Percent complementarity of an oligonucleotide with a target nucleic acid can be determined using routine methods.

[0226] For example, an oligonucleotide in which 18 of 20 nucleobases of the oligonucleotide are complementary to a target region, and would therefore specifically hybridize, would represent 90 percent complementarity. In this example, the remaining non-complementary nucleobases may be clustered or interspersed with complementary nucleobases and need not be contiguous to each other or to complementary nucleobases. As such, an oligonucleotide which is 18 nucleobases in length having four non-complementary nucleobases which are flanked by two regions of complete complementarity with the target nucleic acid would have 77.8% overall complementarity with the target nucleic acid and would thus fall within the scope of the present invention. Percent complementarity of an oligonucleotide with a region of a target nucleic acid can be determined routinely using BLAST programs (basic local alignment search tools) and PowerBLAST programs known in the art (Altschul et al., J Mol. Biol., 1990, 215, 403 410; Zhang and Madden, Genome Res., 1997, 7, 649 656). Percent homology, sequence identity or complementarity, can be determined by, for example, the Gap program (Wisconsin Sequence Analysis Package, Version 8 for Unix, Genetics Computer Group, University Research Park, Madison Wis.), using default settings, which uses the algorithm of Smith and Waterman (Adv. Appl. Math., 1981, 2, 482 489).

[0227] In certain embodiments, oligonucleotides described herein, or specified portions thereof, are fully complementary (i.e. 100% complementary) to a target nucleic acid, or specified portion thereof. For example, an oligonucleotide may be fully complementary to a NOX4 nucleic acid, or a target region, or a target segment or target sequence thereof. As used herein, “fully complementary” means each nucleobase of an oligonucleotide is capable of precise base pairing with the corresponding nucleobases of a target nucleic acid. For example, a 20 nucleobase oligonucleotide is fully complementary to a target sequence that is 400 nucleobases long, so long as there is a corresponding 20 nucleobase portion of the target nucleic acid that is fully complementary to the oligonucleotide. Fully complementary can also be used in reference to a specified portion of the first and/or the second nucleic acid. For example, a 20 nucleobase portion of a 30 nucleobase oligonucleotide can be “fully complementary” to a target sequence that is 400 nucleobases long. The 20 nucleobase portion of the 30 nucleobase oligonucleotide is fully complementary to the target sequence if the target sequence has a corresponding 20 nucleobase portion wherein each nucleobase is complementary to the nucleobase portion of the oligonucleotide. At the same time, the entire 30 nucleobase oligonucleotide may or may not be fully complementary to the target sequence, depending on whether the remaining 10 nucleobases of the oligonucleotide are also complementary to the target sequence.

[0228] In certain embodiments, antisense agents described herein comprise one or more mismatched nucleobases relative to the target nucleic acid. In certain such embodiments, antisense activity against the target is reduced by such mismatch, but activity against a non-target is reduced by a greater amount. Thus, in certain such embodiments selectivity of the antisense agent is improved. In certain embodiments, the mismatch is specifically positioned within an oligonucleotide having a gapmer motif. In certain such embodiments, the mismatch is at position 1, 2, 3, 4, 5, 6, 7, or 8 from the 5′-end of the gap region. In certain such embodiments, the mismatch is at position 9, 8, 7, 6, 5, 4, 3, 2, 1 from the 3′-end of the gap region. In certain such embodiments, the mismatch is at position 1, 2, 3, or 4 from the 5′-end of the wing region. In certain such embodiments, the mismatch is at position 4, 3, 2, or 1 from the 3′-end of the wing region. In certain embodiments, the mismatch is specifically positioned within an oligonucleotide not having a gapmer motif. In certain such embodiments, the mismatch is at position 1, 2, 3, 4, 5, 6, 7, 8, 9, 10, 11, or 12 from the 5′-end of the oligonucleotide. In certain such embodiments, the mismatch is at position, 2, 3, 4, 5, 6, 7, 8, 9, 10, 11, or 12 from the 3′-end of the oligonucleotide.

[0229] The location of a non-complementary nucleobase may be at the 5′ end or 3′ end of the oligonucleotide. Alternatively, the non-complementary nucleobase or nucleobases may be at an internal position of the oligonucleotide. When two or more non-complementary nucleobases are present, they may be contiguous (i.e. linked) or non-contiguous. In one embodiment, a non-complementary nucleobase is located in the wing segment of a gapmer oligonucleotide.

[0230] In certain embodiments, oligonucleotides described herein that are, or are up to 11, 12, 13, 14, 15, 16, 17, 18, 19, or 20 nucleobases in length comprise no more than 4, no more than 3, no more than 2, or no more than 1 non-complementary nucleobase(s) relative to a target nucleic acid, such as a NOX4 nucleic acid, or specified portion thereof.

[0231] In certain embodiments, oligonucleotides described herein that are, or are up to 11, 12, 13, 14, 15, 16, 17, 18, 19, 20, 21, 22, 23, 24, 25, 26, 27, 28, 29, or 30 nucleobases in length comprise no more than 6, no more than 5, no more than 4, no more than 3, no more than 2, or no more than 1 non-complementary nucleobase(s) relative to a target nucleic acid, such as a NOX4 nucleic acid, or specified portion thereof.

[0232] In certain embodiments, oligonucleotides described herein also include those which are complementary to a portion of a target nucleic acid. As used herein, “portion” refers to a defined number of contiguous (i.e. linked) nucleobases within a region or segment of a target nucleic acid. A “portion” can also refer to a defined number of contiguous nucleobases of an oligonucleotide. In certain embodiments, the oligonucleotides are complementary to at least an 8 nucleobase portion of a target segment. In certain embodiments, the oligonucleotides are complementary to at least a 9 nucleobase portion of a target segment. In certain embodiments, the oligonucleotides are complementary to at least a 10 nucleobase portion of a target segment. In certain embodiments, the oligonucleotides are complementary to at least an 11 nucleobase portion of a target segment. In certain embodiments, the oligonucleotides are complementary to at least a 12 nucleobase portion of a target segment. In certain embodiments, the oligonucleotides are complementary to at least a 13 nucleobase portion of a target segment. In certain embodiments, the oligonucleotides are complementary to at least a 14 nucleobase portion of a target segment. In certain embodiments, the oligonucleotides are complementary to at least a 15 nucleobase portion of a target segment. In certain embodiments, the oligonucleotides are complementary to at least a 16 nucleobase portion of a target segment. Also contemplated are oligonucleotides that are complementary to at least a 9, 10, 11, 12, 13, 14, 15, 16, 17, 18, 19, 20, or more nucleobase portion of a target segment, or a range defined by any two of these values.

### Identity

[0233] The oligonucleotides provided herein may also have a defined percent identity to a particular nucleotide sequence, SEQ ID NO, or compound represented by a specific ION number, or portion thereof. An oligonucleotide is identical to a sequence disclosed herein if it has the same nucleobase pairing ability. For example, an RNA which contains uracil in place of thymidine in a disclosed DNA sequence would be considered identical to the DNA sequence since both uracil and thymidine pair with adenine. Shortened and lengthened versions of the oligonucleotides described herein as well as oligonucleotides having non-identical bases relative to the oligonucleotides provided herein also are contemplated. The non-identical bases may be adjacent to each other or dispersed throughout the oligonucleotide. Percent identity of an oligonucleotide is calculated according to the number of bases that have identical base pairing relative to the sequence to which it is being compared.

### Certain Modified Oligonucleotides

[0234] In certain embodiments, antisense agents and antisense compounds described herein comprise or consist of oligonucleotides consisting of linked nucleosides. Oligonucleotides may be unmodified oligonucleotides (RNA or DNA) or may be modified oligonucleotides. Modified oligonucleotides comprise at least one modification relative to unmodified RNA or DNA (i.e., comprise at least one modified nucleoside (comprising a modified sugar moiety and/or a modified nucleobase) and/or at least one modified internucleoside linkage).

### A. Modified Nucleosides

[0235] Modified nucleosides comprise a modified sugar moiety or a modified nucleobase or both a modifed sugar moiety and a modified nucleobase.

### 1. Modified Sugar Moieties

[0236] In certain embodiments, sugar moieties are non-bicyclic modified sugar moieties. In certain embodiments, modified sugar moieties are bicyclic or tricyclic sugar moieties. In certain embodiments, modified sugar moieties are sugar surrogates. Such sugar surrogates may comprise one or more substitutions corresponding to those of other types of modified sugar moieties.

[0237] In certain embodiments, modified sugar moieties are non-bicyclic modified sugar moieties comprising a furanosyl ring with one or more acyclic substituent, including but not limited to substituents at the 2′, 4′, and/or 5′ positions. In certain embodiments one or more acyclic substituent of non-bicyclic modified sugar moieties is branched. Examples of 2′-substituent groups suitable for non-bicyclic modified sugar moieties include but are not limited to: F, OCH₃ (“OMe” or “O-methyl”), and O(CH₂)₂OCH₃ (“MOE”). In certain embodiments, 2′-substituent groups are selected from among: halo, allyl, amino, azido, SH, CN, OCN, CF₃, OCF₃, O—C₁-C₁₀ alkoxy, O—C₁-C₁₀ substituted alkoxy, O—C₁-C₁₀ alkyl, O—C₁-C₁₀ substituted alkyl, S-alkyl, N(Rₘ)-alkyl, O-alkenyl, S-alkenyl, N(Rₘ)-alkenyl, O-alkynyl, S-alkynyl, N(Rₘ)-alkynyl, O-alkylenyl-O-alkyl, alkynyl, alkaryl, aralkyl, O-alkaryl, O-aralkyl, O(CH₂)₂SCH₃, O(CH₂)₂₀N(Rₘ)(Rₙ) or OCH₂C(═O)—N(Rₘ)(Rₙ), where each Rₘ and Rₙ is, independently, H, an amino protecting group, or substituted or unsubstituted C₁-C₁₀ alkyl, —O(CH₂)₂₀N(CH₃)₂ (“DMAOE”), 2′-O(CH₂)₂O(CH₂)₂N(CH₃)₂ (“DMAEOE”), and the 2′-substituent groups described in Cook et al., U.S. Pat. No. 6,531,584; Cook et al., U.S. Pat. No. 5,859,221; and Cook et al., U.S. Pat. No. 6,005,087. Certain embodiments of these 2′-substituent groups can be further substituted with one or more substituent groups independently selected from among: hydroxyl, amino, alkoxy, carboxy, benzyl, phenyl, nitro (NO₂), thiol, thioalkoxy, thioalkyl, halogen, alkyl, aryl, alkenyl and alkynyl. Examples of 4′-substituent groups suitable for non-bicyclic modified sugar moieties include but are not limited to alkoxy (e.g., methoxy), alkyl, and those described in Manoharan et al., WO 2015/106128. Examples of 5′-substituent groups suitable for non-bicyclic modified sugar moieties include but are not limited to: 5′-methyl (R or S), 5′-vinyl, and 5′-methoxy. In certain embodiments, non-bicyclic modified sugars comprise more than one non-bridging sugar substituent, for example, 2′-F-5′-methyl sugar moieties and the modified sugar moieties and modified nucleosides described in Migawa et al., WO 2008/101157 and Rajeev et al., US2013/0203836.

[0238] In certain embodiments, a 2′-substituted nucleoside or 2′-non-bicyclic modified nucleoside comprises a sugar moiety comprising a linear 2′-substituent group selected from: F, NH₂, N₃, OCF₃, OCH₃, O(CH₂)₃NH₂, CH₂CH═CH₂, OCH₂CH═CH₂, OCH₂CH₂OCH₃, O(CH₂)₂SCH₃, O(CH₂)₂ON(Rₘ)(Rₙ), O(CH₂)₂O(CH₂)₂N(CH₃)₂, and N-substituted acetamide (OCH₂C(═O)—N(Rₘ)(Rₙ)), where each Rₘ and Rₙ is, independently, H, an amino protecting group, or substituted or unsubstituted C₁-C₁₀ alkyl.

[0239] In certain embodiments, a 2′-substituted nucleoside or 2′-non-bicyclic modified nucleoside comprises a sugar moiety comprising a linear 2′-substituent group selected from: F, OCF₃, OCH₃, OCH₂CH₂OCH₃, O(CH₂)₂SCH₃, O(CH₂)₂ON(CH₃)₂ (“DMAOE”), 2′-O(CH₂)₂O(CH₂)₂N(CH₃)₂ (“DMAEOE”), and OCH₂C(═O)—N(H)CH₃ (“NMA”).

[0240] In certain embodiments, a 2′-substituted nucleoside or 2′-non-bicyclic modified nucleoside comprises a sugar moiety comprising a linear 2′-substituent group selected from: F, OCH₃, and OCH₂CH₂OCH₃, O(CH₂)₂SCH₃, O(CH₂)₂ON(CH₃)₂, O(CH₂)₂O(CH₂)₂N(CH₃)₂, and OCH₂C(═O)—N(H)CH₃ (“NMA”).

[0241] Nucleosides comprising modified sugar moieties, such as non-bicyclic modified sugar moieties, are referred to by the position(s) of the substitution(s) on the sugar moiety of the nucleoside. For example, nucleosides comprising 2′-substituted or 2-modified sugar moieties are referred to as 2′-substituted nucleosides or 2-modified nucleosides.

[0242] Certain modified sugar moieties comprise a bridging sugar substituent that forms a second ring resulting in a bicyclic sugar moiety. In certain such embodiments, the bicyclic sugar moiety comprises a bridge between the 4′ and the 2′ furanose ring atoms. Examples of such 4′ to 2′ bridging sugar substituents include but are not limited to: 4′-CH₂-2′, 4′-(CH₂)₂-2′, 4′-(CH₂)₃-2′, 4′-CH₂—O-2′ (“LNA”), 4′-CH₂—S-2′, 4′-(CH₂)₂—O-2′ (“ENA”), 4′-CH(CH₃)—O-2′ (referred to as “constrained ethyl” or “cEt” when in the S configuration), 4′-CH₂—O—CH₂-2′, 4′-CH₂—N(R)-2′, 4′-CH(CH₂OCH₃)—O-2′ (“constrained MOE” or “cMOE”) and analogs thereof (see, e.g., Seth et al., U.S. Pat. No. 7,399,845, Bhat et al., U.S. Pat. No. 7,569,686, Swayze et al., U.S. Pat. No. 7,741,457, and Swayze et al., U.S. Pat. No. 8,022,193), 4′-C(CH₃)(CH₃)—O-2′ and analogs thereof (see, e.g., Seth et al., U.S. Pat. No. 8,278,283), 4′-CH₂—N(OCH₃)-2′ and analogs thereof (see, e.g., Prakash et al., U.S. Pat. No. 8,278,425), 4′-CH₂—O—N(CH₃)-2′ (see, e.g., Allerson et al., U.S. Pat. No. 7,696,345 and Allerson et al., U.S. Pat. No. 8,124,745), 4′-CH₂—C(H)(CH₃)-2′ (see, e.g., Zhou, et al., J. Org. Chem., 2009, 74, 118-134), 4′-CH₂—C(═CH₂)-2′ and analogs thereof (see e.g., Seth et al., U.S. Pat. No. 8,278,426), 4′-C(RₐR_{b})—N(R)—O-2′, 4′-C(RₐR_{b})—O—N(R)-2′, 4′-CH₂—O—N(R)-2′, and 4′-CH₂—N(R)—O-2′, wherein each R, Rₐ, and R_{b} is, independently, H, a protecting group, or C₁-C₁₂ alkyl (see, e.g. Imanishi et al., U.S. Pat. No. 7,427,672).

[0243] In certain embodiments, such 4′ to 2′ bridges independently comprise from 1 to 4 linked groups independently selected from: —[C(Rₐ)(R_{b})]ₙ—, —[C(Rₐ)(R_{b})]ₙ—O—, —C(Rₐ)═C(R_{b})—, —C(Rₐ)═N—, —C(═NRₐ)—, —C(═O)—, —C(═S)—, —O—, —Si(Rₐ)₂—, —S(═O)ₓ—, and —N(Rₐ)—;
[0244] wherein:
[0245] x is 0, 1, or 2;
[0246] n is 1, 2, 3, or 4;
   each Rₐ and R_{b} is, independently, H, a protecting group, hydroxyl, C₁-C₁₂ alkyl, substituted C₁-C₁₂ alkyl, C₂-C₁₂ alkenyl, substituted C₂-C₁₂ alkenyl, C₂-C₁₂ alkynyl, substituted C₂-C₁₂ alkynyl, C₅-C₂₀ aryl, substituted C₅-C₂₀ aryl, heterocycle radical, substituted heterocycle radical, heteroaryl, substituted heteroaryl, C₅-C₇ alicyclic radical, substituted C₅-C₇ alicyclic radical, halogen, OJI, NJ₁J₂, SJ₁, N₃, COOJ₁, acyl (C(═O)—H), substituted acyl, CN, sulfonyl (S(═O)₂-J₁), or sulfoxyl (S(═O)-J₁); and each J₁ and J₂ is, independently, H, C₁-C₁₂ alkyl, substituted C₁-C₁₂ alkyl, C₂-C₁₂ alkenyl, substituted C₂-C₁₂ alkenyl, C₂-C₁₂ alkynyl, substituted C₂-C₁₂ alkynyl, C₅-C₂₀ aryl, substituted C₅-C₂₀ aryl, acyl (C(═O)—H), substituted acyl, a heterocycle radical, a substituted heterocycle radical, C₁-C₁₂ aminoalkyl, substituted C₁-C₁₂ aminoalkyl, or a protecting group.

[0247] Additional bicyclic sugar moieties are known in the art, see, for example: Freier et al., Nucleic Acids Research, 1997, 25(22), 4429-4443, Albaek et al., J. Org. Chem., 2006, 71, 7731-7740, Singh et al., Chem. Commun., 1998, 4, 455-456; Koshkin et al., Tetrahedron, 1998, 54, 3607-3630; Wahlestedt et al., Proc. Natl. Acad. Sci. U.S.A, 2000, 97, 5633-5638; Kumar et al., Bioorg. Med. Chem. Lett., 1998, 8, 2219-2222; Singh et al., J. Org. Chem., 1998, 63, 10035-10039; Srivastava et al., J Am. Chem. Soc., 20017, 129, 8362-8379; Elayadi et al., Curr. Opinion Invens. Drugs, 2001, 2, 558-561; Braasch et al., Chem. Biol., 2001, 8, 1-7; Orum et al., Curr. Opinion Mol. Ther., 2001, 3, 239-243; Wengel et al., U.S. Pat. No. 7,053,207, Imanishi et al., U.S. Pat. No. 6,268,490, Imanishi et al. U.S. Pat. No. 6,770,748, Imanishi et al., U.S. RE44,779; Wengel et al., U.S. Pat. No. 6,794,499, Wengel et al., U.S. Pat. No. 6,670,461; Wengel et al., U.S. Pat. No. 7,034,133, Wengel et al., U.S. Pat. No. 8,080,644; Wengel et al., U.S. Pat. No. 8,034,909; Wengel et al., U.S. Pat. No. 8,153,365; Wengel et al., U.S. Pat. No. 7,572,582; and Ramasamy et al., U.S. Pat. No. 6,525,191, Torsten et al., WO 2004/106356, Wengel et al., WO 91999/014226; Seth et al., WO 2007/134181; Seth et al., U.S. Pat. No. 7,547,684; Seth et al., U.S. Pat. No. 7,666,854; Seth et al., U.S. Pat. No. 8,088,746; Seth et al., U.S. Pat. No. 7,750,131; Seth et al., U.S. Pat. No. 8,030,467; Seth et al., U.S. Pat. No. 8,268,980; Seth et al., U.S. Pat. No. 8,546,556; Seth et al., U.S. Pat. No. 8,530,640; Migawa et al., U.S. Pat. No. 9,012,421; Seth et al., U.S. Pat. No. 8,501,805; and U.S. patent Publication Nos. Allerson et al., US2008/0039618 and Migawa et al., US2015/0191727.

[0248] In certain embodiments, bicyclic sugar moieties and nucleosides incorporating such bicyclic sugar moieties are further defined by isomeric configuration. For example, an LNA nucleoside (described herein) may be in the α-L configuration or in the β-D configuration.

[chemical structure]

[0249] α-L-methyleneoxy (4′-CH₂—O—2′) or α-L-LNA bicyclic nucleosides have been incorporated into oligonucleotides that showed antisense activity (Frieden et al., Nucleic Acids Research, 2003, 21, 6365-6372). Herein, general descriptions of bicyclic nucleosides include both isomeric configurations. When the positions of specific bicyclic nucleosides (e.g., LNA or cEt) are identified in exemplified embodiments herein, they are in the β-D configuration, unless otherwise specified.

[0250] In certain embodiments, modified sugar moieties comprise one or more non-bridging sugar substituent and one or more bridging sugar substituent (e.g., 5′-substituted and 4′-2′ bridged sugars).

[0251] In certain embodiments, modified sugar moieties are sugar surrogates. In certain such embodiments, the oxygen atom of the sugar moiety is replaced, e.g., with a sulfur, carbon or nitrogen atom. In certain such embodiments, such modified sugar moieties also comprise bridging and/or non-bridging substituents as described herein. For example, certain sugar surrogates comprise a 4′-sulfur atom and a substitution at the 2′-position (see, e.g., Bhat et al., U.S. Pat. No. 7,875,733 and Bhat et al., U.S. Pat. No. 7,939,677) and/or the 5′ position.

[0252] In certain embodiments, sugar surrogates comprise rings having other than 5 atoms. For example, in certain embodiments, a sugar surrogate comprises a six-membered tetrahydropyran (“THP”). Such tetrahydropyrans may be further modified or substituted. Nucleosides comprising such modified tetrahydropyrans include but are not limited to hexitol nucleic acid (“HNA”), anitol nucleic acid (“ANA”), manitol nucleic acid (“MNA”) (see e.g., Leumann, C J. Bioorg. & Med. Chem. 2002, 10, 841-854), fluoro HNA:

[chemical structure]

(“F-HNA”, see e.g., Swayze et al., U.S. Pat. No. 8,088,904; Swayze et al., U.S. Pat. No. 8,440,803; Swayze et al., U.S.; and Swayze et al., U.S. Pat. No. 9,005,906, F-HNA can also be referred to as a F-THP or 3′-fluoro tetrahydropyran), and nucleosides comprising additional modified THP compounds having the formula:

[chemical structure]

wherein, independently, for each of said modified THP nucleoside: Bx is a nucleobase moiety; T₃ and T₄ are each, independently, an internucleoside linking group linking the modified THP nucleoside to the remainder of an oligonucleotide or one of T₃ and T₄ is an internucleoside linking group linking the modified THP nucleoside to the remainder of an oligonucleotide and the other of T₃ and T₄ is H, a hydroxyl protecting group, a linked conjugate group, or a 5′ or 3′-terminal group; q₁, q₂, q₃, q₄, q₅, q₆ and q₇ are each, independently, H, C₁-C₆ alkyl, substituted C₁-C₆ alkyl, C₂-C₆ alkenyl, substituted C₂-C₆ alkenyl, C₂-C₆ alkynyl, or substituted C₂-C₆ alkynyl; and each of R₁ and R₂ is independently selected from among: hydrogen, halogen, substituted or unsubstituted alkoxy, NJ₁J₂, SJ₁, N₃, OC(═X)J₁, OC(═X)NJ₁J₂, NJ₃C(═X)NJ₁J₂, and CN, wherein X is O, S or NJ₁, and each J₁, J₂, and J₃ is, independently, H or C₁-C₆ alkyl.

[0253] In certain embodiments, modified THP nucleosides are provided wherein q₁, q₂, q₃, q₄, q₅, q₆ and q₇ are each H. In certain embodiments, at least one of q₁, q₂, q₃, q₄, q₅, q₆ and q₇ is other than H. In certain embodiments, at least one of q₁, q₂, q₃, q₄, q₅, q₆ and q₇ is methyl. In certain embodiments, modified THP nucleosides are provided wherein one of R₁ and R₂ is F. In certain embodiments, R₁ is F and R₂ is H, in certain embodiments, R₁ is methoxy and R₂ is H, and in certain embodiments, R₁ is methoxyethoxy and R₂ is H.

[0254] In certain embodiments, sugar surrogates comprise rings having more than 5 atoms and more than one heteroatom. For example, nucleosides comprising morpholino sugar moieties and their use in oligonucleotides have been reported (see, e.g., Braasch et al., Biochemistry, 2002, 41, 4503-4510 and Summerton et al., U.S. Pat. No. 5,698,685; Summerton et al., U.S. Pat. No. 5,166,315; Summerton et al., U.S. Pat. No. 5,185,444; and Summerton et al., U.S. Pat. No. 5,034,506). As used here, the term “morpholino” means a sugar surrogate having the following structure:

[chemical structure]

[0255] In certain embodiments, morpholinos may be modified, for example by adding or altering various substituent groups from the above morpholino structure. Such sugar surrogates are referred to herein as “modified morpholinos.”

[0256] In certain embodiments, sugar surrogates comprise acyclic moieties. Examples of nucleosides and oligonucleotides comprising such acyclic sugar surrogates include but are not limited to: peptide nucleic acid (“PNA”), acyclic butyl nucleic acid (see, e.g., Kumar et al., Org. Biomol. Chem., 2013, 11, 5853-5865), and nucleosides and oligonucleotides described in Manoharan et al., WO2011/133876.

[0257] Many other bicyclic and tricyclic sugar and sugar surrogate ring systems are known in the art that can be used in modified nucleosides.

### 2. Modified Nucleobases

[0258] Nucleobase (or base) modifications or substitutions are structurally distinguishable from, yet functionally interchangeable with, naturally occurring or synthetic unmodified nucleobases. Both natural and modified nucleobases are capable of participating in hydrogen bonding. Such nucleobase modifications can impart nuclease stability, binding affinity or some other beneficial biological property to oligonucleotides described herein.

[0259] In certain embodiments, modified oligonucleotides comprise one or more nucleoside comprising an unmodified nucleobase. In certain embodiments, modified oligonucleotides comprise one or more nucleoside comprising a modified nucleobase. In certain embodiments, modified oligonucleotides comprise one or more nucleoside that does not comprise a nucleobase, referred to as an abasic nucleoside.

[0260] In certain embodiments, modified nucleobases are selected from: 5-substituted pyrimidines, 6-azapyrimi-dines, alkyl or alkynyl substituted pyrimidines, alkyl substituted purines, and N-2, N-6 and 0-6 substituted purines. In certain embodiments, modified nucleobases are selected from: 2-aminopropyladenine, 5-hydroxymethyl cytosine, 5-methylcytosine, xanthine, hypoxanthine, 2-aminoadenine, 6-N-methylguanine, 6-N-methyladenine, 2-propyladenine, 2-thiouracil, 2-thiothymine and 2-thiocytosine, 5-propynyl (C≡C—CH3) uracil, 5-propynylcytosine, 6-azouracil, 6-azocytosine, 6-azothymine, 5-ribosyluracil (pseudouracil), 4-thiouracil, 8-halo, 8-amino, 8-thiol, 8-thioalkyl, 8-hydroxyl, 8-aza and other 8-substituted purines, 5-halo, particularly 5-bromo, 5-trifluoromethyl, 5-halouracil, and 5-halocytosine, 7-methylguanine, 7-methyladenine, 2-F-adenine, 2-aminoadenine, 7-deazaguanine, 7-deazaadenine, 3-deazaguanine, 3-deazaadenine, 6-N-benzoyladenine, 2-N-isobutyrylguanine, 4-N-benzoylcytosine, 4-N-benzoyluracil, 5-methyl 4-N-benzoylcytosine, 5-methyl 4-N-benzoyluracil, universal bases, hydrophobic bases, promiscuous bases, size-expanded bases, and fluorinated bases. Further modified nucleobases include tricyclic pyrimidines, such as 1,3-diazaphenoxazine-2-one, 1,3-diazaphenothiazine-2-one and 9-(2-aminoethoxy)-1,3-diazaphenoxazine-2-one (G-clamp). Modified nucleobases may also include those in which the purine or pyrimidine base is replaced with other heterocycles, for example 7-deaza-adenine, 7-deazaguanosine, 2-aminopyridine and 2-pyridone. Further nucleobases include those disclosed in Merigan et al., U.S. Pat. No. 3,687,808, those disclosed in The Concise Encyclopedia Of Polymer Science And Engineering, Kroschwitz, J. I., Ed., John Wiley & Sons, 1990, 858-859; Englisch et al., Angewandte Chemie, International Edition, 1991, 30, 613; Sanghvi, Y. S., Chapter 15, Antisense Research and Applications, Crooke, S. T. and Lebleu, B., Eds., CRC Press, 1993, 273-288; and those disclosed in Chapters 6 and 15, Antisense Drug Technology, Crooke S. T., Ed., CRC Press, 2008, 163-166 and 442-443.

[0261] Publications that teach the preparation of certain of the above noted modified nucleobases as well as other modified nucleobases include without limitation, Manoharan et al., US2003/0158403, Manoharan et al., US2003/0175906; Dinh et al., U.S. Pat. No. 4,845,205; Spielvogel et al., U.S. Pat. No. 5,130,302; Rogers et al., U.S. Pat. No. 5,134,066; Bischofberger et al., U.S. Pat. No. 5,175,273; Urdea et al., U.S. Pat. No. 5,367,066; Benner et al., U.S. Pat. No. 5,432,272; Matteucci et al., U.S. Pat. No. 5,434,257; Gmeiner et al., U.S. Pat. No. 5,457,187; Cook et al., U.S. Pat. No. 5,459,255; Froehler et al., U.S. Pat. No. 5,484,908; Matteucci et al., U.S. Pat. No. 5,502,177; Hawkins et al., U.S. Pat. No. 5,525,711; Haralambidis et al., U.S. Pat. No. 5,552,540; Cook et al., U.S. Pat. No. 5,587,469; Froehler et al., U.S. Pat. No. 5,594,121; Switzer et al., U.S. Pat. No. 5,596,091; Cook et al., U.S. Pat. No. 5,614,617; Froehler et al., U.S. Pat. No. 5,645,985; Cook et al., U.S. Pat. No. 5,681,941; Cook et al., U.S. Pat. No. 5,811,534; Cook et al., U.S. Pat. No. 5,750,692; Cook et al., U.S. Pat. No. 5,948,903; Cook et al., U.S. Pat. No. 5,587,470; Cook et al., U.S. Pat. No. 5,457,191; Matteucci et al., U.S. Pat. No. 5,763,588; Froehler et al., U.S. Pat. No. 5,830,653; Cook et al., U.S. Pat. No. 5,808,027; Cook et al., 6,166,199; and Matteucci et al., U.S. Pat. No. 6,005,096.

[0262] In certain embodiments, modified oligonucleotides comprise one or more modified nucleobases. In certain embodiments, the modified nucleobase is 5-methylcytosine. In certain embodiments, each cytosine is a 5-methylcytosine.

### 3. Modified Internucleoside Linkages

[0263] The naturally occurring internucleoside linkage of RNA and DNA is a 3′ to 5′ phosphodiester linkage. In certain embodiments, oligonucleotides described herein having one or more modified, i.e. non-naturally occurring, internucleoside linkages are often selected over oligonucleotides having naturally occurring internucleoside linkages because of desirable properties such as, for example, enhanced cellular uptake, enhanced affinity for target nucleic acids, and increased stability in the presence of nucleases.

[0264] In certain embodiments, oligonucleotides comprise one or more modified internucleoside linkages. In certain embodiments, the modified internucleoside linkages are phosphorothioate linkages. In certain embodiments, each internucleoside linkage of the oligonucleotide is a phosphorothioate internucleoside linkage.

[0265] In certain embodiments, oligonucleotides having modified internucleoside linkages include internucleoside linkages that retain a phosphorus atom as well as internucleoside linkages that do not have a phosphorus atom. Representative phosphorus containing internucleoside linkages include, but are not limited to, phosphodiesters, phosphotriesters, methylphosphonates, phosphoramidate, and phosphorothioates. Methods of preparation of phosphorous-containing and non-phosphorous-containing linkages are well known.

[0266] In certain embodiments, nucleosides of modified oligonucleotides may be linked together using any internucleoside linkage. The two main classes of internucleoside linking groups are defined by the presence or absence of a phosphorus atom. Representative phosphorus-containing internucleoside linkages include but are not limited to phosphates, which contain a phosphodiester bond (“P═O”) (also referred to as unmodified or naturally occurring linkages), phosphotriesters, methylphosphonates, phosphoramidates, and phosphorothioates (“P═S”), and phosphorodithioates (“HS—P═S”). Representative non-phosphorus containing internucleoside linking groups include but are not limited to methylenemethylimino (—CH₂—N(CH₃)—O—CH₂—), thiodiester, thionocarbamate (—O—C(═O)(NH)—S—); siloxane (—O—SiH₂—O—); and N,N′-dimethylhydrazine (—CH₂—N(CH₃)—N(CH₃)—). Modified internucleoside linkages, compared to naturally occurring phosphate linkages, can be used to alter, typically increase, nuclease resistance of the oligonucleotide. In certain embodiments, internucleoside linkages having a chiral atom can be prepared as a racemic mixture, or as separate enantiomers. Representative chiral internucleoside linkages include but are not limited to alkylphosphonates and phosphorothioates. Methods of preparation of phosphorous-containing and non-phosphorous-containing internucleoside linkages are well known to those skilled in the art.

[0267] Neutral internucleoside linkages include, without limitation, phosphotriesters, methylphosphonates, MMI (3′-CH₂—N(CH₃)—O—5′), amide-3 (3′-CH₂—C(═O)—N(H)-5′), amide-4 (3′-CH₂—N(H)—C(═O)-5′), formacetal (3′-O—CH₂—O—5′), methoxypropyl, and thioformacetal (3′-S—CH₂—O—5′). Further neutral internucleoside linkages include nonionic linkages comprising siloxane (dialkylsiloxane), carboxylate ester, carboxamide, sulfide, sulfonate ester and amides (See for example: Carbohydrate Modifications in Antisense Research; Y. S. Sanghvi and P. D. Cook, Eds., ACS Symposium Series 580; Chapters 3 and 4, 40-65). Further neutral internucleoside linkages include nonionic linkages comprising mixed N, O, S and CH₂ component parts.

### B. Certain Motifs

[0268] In certain embodiments, oligonucleotides can have a motif, e.g. a pattern of unmodified and/or modified sugar moieties, nucleobases, and/or internucleoside linkages. In certain embodiments, modified oligonucleotides comprise one or more modified nucleoside comprising a modified sugar. In certain embodiments, modified oligonucleotides comprise one or more modified nucleosides comprising a modified nucleobase. In certain embodiments, modified oligonucleotides comprise one or more modified internucleoside linkage. In such embodiments, the modified, unmodified, and differently modified sugar moieties, nucleobases, and/or internucleoside linkages of a modified oligonucleotide define a pattern or motif. In certain embodiments, the patterns of sugar moieties, nucleobases, and internucleoside linkages are each independent of one another. Thus, a modified oligonucleotide may be described by its sugar motif, nucleobase motif and/or internucleoside linkage motif (as used herein, nucleobase motif describes the modifications to the nucleobases independent of the sequence of nucleobases).

### 1. Certain Sugar Motifs

[0269] In certain embodiments, antisense agents and antisense compounds described herein comprise oligonucleotides. In certain embodiments, oligonucleotides comprise one or more type of modified sugar and/or unmodified sugar moiety arranged along the oligonucleotide or region thereof in a defined pattern or sugar motif. In certain instances, such sugar motifs include but are not limited to any of the sugar modifications discussed herein.

[0270] In certain embodiments, modified oligonucleotides comprise or consist of a region having a gapmer motif, which comprises two external regions or “wings” and a central or internal region or “gap.” The three regions of a gapmer motif (the 5′-wing, the gap, and the 3′-wing) form a contiguous sequence of nucleosides wherein at least some of the sugar moieties of the nucleosides of each of the wings differ from at least some of the sugar moieties of the nucleosides of the gap. Specifically, at least the sugar moieties of the nucleosides of each wing that are closest to the gap (the 3′-most nucleoside of the 5′-wing and the 5′-most nucleoside of the 3′-wing) differ from the sugar moiety of the neighboring gap nucleosides, thus defining the boundary between the wings and the gap (i.e., the wing/gap junction). In certain embodiments, the sugar moieties within the gap are the same as one another. In certain embodiments, the gap includes one or more nucleoside having a sugar moiety that differs from the sugar moiety of one or more other nucleosides of the gap. In certain embodiments, the sugar motifs of the two wings are the same as one another (symmetric gapmer). In certain embodiments, the sugar motif of the 5′-wing differs from the sugar motif of the 3′-wing (asymmetric gapmer).

[0271] In certain embodiments, the wings of a gapmer comprise 1-5 nucleosides. In certain embodiments, the wings of a gapmer comprise 2-5 nucleosides. In certain embodiments, the wings of a gapmer comprise 3-nucleosides. In certain embodiments, the nucleosides of a gapmer are all modified nucleosides.

[0272] In certain embodiments, the gap of a gapmer comprises 7-12 nucleosides. In certain embodiments, the gap of a gapmer comprises 7-10 nucleosides. In certain embodiments, the gap of a gapmer comprises 8-10 nucleosides. In certain embodiments, the gap of a gapmer comprises 10 nucleosides. In certain embodiment, each nucleoside of the gap of a gapmer is an unmodified 2′-deoxy nucleoside.

[0273] In certain embodiments, the gapmer is a deoxy gapmer. In such embodiments, the nucleosides on the gap side of each wing/gap junction are unmodified 2′-deoxy nucleosides and the nucleosides on the wing sides of each wing/gap junction are modified nucleosides. In certain such embodiments, each nucleoside of the gap is an unmodified 2′-deoxy nucleoside. In certain such embodiments, each nucleoside of each wing is a modified nucleoside.

[0274] In certain embodiments, a modified oligonucleotide has a fully modified sugar motif wherein each nucleoside of the modified oligonucleotide comprises a modified sugar moiety. In certain embodiments, modified oligonucleotides comprise or consist of a region having a fully modified sugar motif wherein each nucleoside of the region comprises a modified sugar moiety. In certain embodiments, modified oligonucleotides comprise or consist of a region having a fully modified sugar motif, wherein each nucleoside within the fully modified region comprises the same modified sugar moiety, referred to herein as a uniformly modified sugar motif. In certain embodiments, a fully modified oligonucleotide is a uniformly modified oligonucleotide. In certain embodiments, each nucleoside of a uniformly modified comprises the same 2′-modification.

### 2. Certain Nucleobase Motifs

[0275] In certain embodiments, antisense agents and antisense compounds described herein comprise oligonucleotides. In certain embodiments, oligonucleotides comprise modified and/or unmodified nucleobases arranged along the oligonucleotide or region thereof in a defined pattern or motif. In certain embodiments, each nucleobase is modified. In certain embodiments, none of the nucleobases are modified. In certain embodiments, each purine or each pyrimidine is modified. In certain embodiments, each adenine is modified. In certain embodiments, each guanine is modified. In certain embodiments, each thymine is modified. In certain embodiments, each uracil is modified. In certain embodiments, each cytosine is modified. In certain embodiments, some or all of the cytosine nucleobases in a modified oligonucleotide are 5-methylcytosines.

[0276] In certain embodiments, modified oligonucleotides comprise a block of modified nucleobases. In certain such embodiments, the block is at the 3′-end of the oligonucleotide. In certain embodiments the block is within 3 nucleosides of the 3′-end of the oligonucleotide. In certain embodiments, the block is at the 5′-end of the oligonucleotide. In certain embodiments the block is within 3 nucleosides of the 5′-end of the oligonucleotide.

[0277] In certain embodiments, oligonucleotides having a gapmer motif comprise a nucleoside comprising a modified nucleobase. In certain such embodiments, one nucleoside comprising a modified nucleobase is in the central gap of an oligonucleotide having a gapmer motif. In certain such embodiments, the sugar moiety of said nucleoside is a 2′-deoxyribosyl moiety. In certain embodiments, the modified nucleobase is selected from: a 2-thiopyrimidine and a 5-propynepyrimidine.

### 3. Certain Internucleoside Linkage Motifs

[0278] In certain embodiments, antisense agents and antisense compounds described herein comprise oligonucleotides. In certain embodiments, oligonucleotides comprise modified and/or unmodified internucleoside linkages arranged along the oligonucleotide or region thereof in a defined pattern or motif. In certain embodiments, essentially each internucleoside linking group is a phosphodiester internucleoside linkage (P═O). In certain embodiments, each internucleoside linking group of a modified oligonucleotide is a phosphorothioate (P═S). In certain embodiments, each internucleoside linking group of a modified oligonucleotide is independently selected from a phosphorothioate and phosphodiester internucleoside linkage. In certain embodiments, each phosphorothioate internucleoside linkage is independently selected from a stereorandom phosphorothioate, a (Sp) phosphorothioate, and a (Rp) phosphorothioate.

[0279] In certain embodiments, the sugar motif of a modified oligonucleotide is a gapmer and the internucleoside linkages within the gap are all modified. In certain such embodiments, some or all of the internucleoside linkages in the wings are unmodified phosphate linkages. In certain embodiments, the terminal internucleoside linkages are modified.

### Certain Conjugated Antisense Agents and Antisense Compounds

[0280] In certain embodiments, antisense agents and antisense compounds described herein comprise or consist of an oligonucleotide (modified or unmodified) and, optionally, one or more conjugate groups and/or terminal groups. Conjugate groups consist of one or more conjugate moiety and a conjugate linker which links the conjugate moiety to the oligonucleotide. Conjugate groups may be attached to either or both ends of an oligonucleotide and/or at any internal position. In certain embodiments, conjugate groups are attached to the 2′-position of a nucleoside of a modified oligonucleotide. In certain embodiments, conjugate groups that are attached to either or both ends of an oligonucleotide are terminal groups. In certain such embodiments, conjugate groups or terminal groups are attached at the 3′ and/or 5′-end of oligonucleotides. In certain such embodiments, conjugate groups (or terminal groups) are attached at the 3′-end of oligonucleotides. In certain embodiments, conjugate groups are attached near the 3′-end of oligonucleotides. In certain embodiments, conjugate groups (or terminal groups) are attached at the 5′-end of oligonucleotides. In certain embodiments, conjugate groups are attached near the 5′-end of oligonucleotides. In certain embodiments, the antisense agent is an RNAi agent comprising a conjugate group. In certain embodiments, the RNAi agent comprises an antisense compound and a sense compound, wherein the sense compound comprises a conjugate group. In certain embodiments, the sense compound comprises a sense oligonucleotide and a conjugate group attached to the sense oligonucleotide. In certain embodiments, the conjugate group is attached to the 3′ end of the sense oligonucleotide.

[0281] In certain embodiments, the oligonucleotide is modified. In certain embodiments, the oligonucleotide has a nucleobase sequence that is complementary to a target nucleic acid. In certain embodiments, oligonucleotides are complementary to a messenger RNA (mRNA). In certain embodiments, oligonucleotides are complementary to a pre-mRNA. In certain embodiments, oligonucleotides are complementary to a sense transcript.

[0282] Examples of terminal groups include but are not limited to conjugate groups, capping groups, phosphate moieties, protecting groups, modified or unmodified nucleosides, and two or more nucleosides that are independently modified or unmodified.

[0283] In certain embodiments, oligonucleotides are covalently attached to one or more conjugate groups. In certain embodiments, conjugate groups modify one or more properties of the attached oligonucleotide, including but not limited to pharmacodynamics, pharmacokinetics, stability, binding, absorption, tissue distribution, cellular distribution, cellular uptake, charge and clearance. In certain embodiments, conjugate groups impart a new property on the attached oligonucleotide, e.g., fluorophores or reporter groups that enable detection of the oligonucleotide. Certain conjugate groups and conjugate moieties have been described previously, for example: cholesterol moiety (Letsinger et al., Proc. Natl. Acad. Sci. USA, 1989, 86, 6553-6556), cholic acid (Manoharan et al., Bioorg. Med. Chem. Lett., 1994, 4, 1053-1060), a thioether, e.g., hexyl-S-tritylthiol (Manoharan et al., Ann. N.Y. Acad. Sci., 1992, 660, 306-309; Manoharan et al., Bioorg. Med. Chem. Lett., 1993, 3, 2765-2770), a thiocholesterol (Oberhauser et al., Nucl. Acids Res., 1992, 20, 533-538), an aliphatic chain, e.g., do-decan-diol or undecyl residues (Saison-Behmoaras et al., EMBO J., 1991, 10, 1111-1118; Kabanov et al., FEBS Lett., 1990, 259, 327-330; Svinarchuk et al., Biochimie, 1993, 75, 49-54), a phospholipid, e.g., di-hexadecyl-rac-glycerol or triethyl-ammonium 1,2-di-O-hexadecyl-rac-glycero-3-H-phosphonate (Manoharan et al., Tetrahedron Lett., 1995, 36, 3651-3654; Shea et al., Nucl. Acids Res., 1990, 18, 3777-3783), a polyamine or a polyethylene glycol chain (Manoharan et al., Nucleosides & Nucleotides, 1995, 14, 969-973), or adamantane acetic acid a palmityl moiety (Mishra et al., Biochim. Biophys. Acta, 1995, 1264, 229-237), an octadecylamine or hexylamino-carbonyl-oxycholesterol moiety (Crooke et al., J Pharmacol. Exp. Ther., 1996, 277, 923-937), a tocopherol group (Nishina et al., Molecular Therapy Nucleic Acids, 2015, 4, e220; and Nishina et al., Molecular Therapy, 2008, 16, 734-740), or a GalNAc cluster (e.g., WO2014/179620).

### 1. Conjugate Moieties

[0284] Conjugate moieties include, without limitation, intercalators, reporter molecules, polyamines, polyamides, peptides, carbohydrates (e.g., GalNAc), vitamin moieties, polyethylene glycols, thioethers, polyethers, cholesterols, thiocholesterols, cholic acid moieties, folate, lipids, phospholipids, biotin, phenazine, phenanthridine, anthraquinone, adamantane, acridine, fluoresceins, rhodamines, coumarins, fluorophores, and dyes.

[0285] In certain embodiments, a conjugate moiety comprises an active drug substance, for example, aspirin, warfarin, phenylbutazone, ibuprofen, suprofen, fen-bufen, ketoprofen, (S)-(+)-pranoprofen, carprofen, dansylsarcosine, 2,3,5-triiodobenzoic acid, fingolimod, flufenamic acid, folinic acid, a benzothiadiazide, chlorothiazide, a diazepine, indo-methicin, a barbiturate, a cephalosporin, a sulfa drug, an antidiabetic, an antibacterial or an antibiotic.

### 2. Conjugate Linkers

[0286] Conjugate moieties are attached to oligonucleotides through conjugate linkers. In certain antisense agents and antisense compounds, the conjugate linker is a single chemical bond (i.e., the conjugate moiety is attached directly to an oligonucleotide through a single bond). In certain antisense agents and antisense compounds, a conjugate moiety is attached to an oligonucleotide via a more complex conjugate linker comprising one or more conjugate linker moieties, which are sub-units making up a conjugate linker. In certain embodiments, the conjugate linker comprises a chain structure, such as a hydrocarbyl chain, or an oligomer of repeating units such as ethylene glycol, nucleosides, or amino acid units.

[0287] In certain embodiments, a conjugate linker comprises one or more groups selected from alkyl, amino, oxo, amide, disulfide, polyethylene glycol, ether, thioether, and hydroxylamino. In certain such embodiments, the conjugate linker comprises groups selected from alkyl, amino, oxo, amide and ether groups. In certain embodiments, the conjugate linker comprises groups selected from alkyl and amide groups. In certain embodiments, the conjugate linker comprises groups selected from alkyl and ether groups. In certain embodiments, the conjugate linker comprises at least one phosphorus moiety. In certain embodiments, the conjugate linker comprises at least one phosphate group. In certain embodiments, the conjugate linker includes at least one neutral linking group.

[0288] In certain embodiments, conjugate linkers, including the conjugate linkers described above, are bifunctional linking moieties, e.g., those known in the art to be useful for attaching conjugate groups to parent compounds, such as the oligonucleotides provided herein. In general, a bifunctional linking moiety comprises at least two functional groups. One of the functional groups is selected to bind to a particular site on a parent compound and the other is selected to bind to a conjugate group. Examples of functional groups used in a bifunctional linking moiety include but are not limited to electrophiles for reacting with nucleophilic groups and nucleophiles for reacting with electrophilic groups. In certain embodiments, bifunctional linking moieties comprise one or more groups selected from amino, hydroxyl, carboxylic acid, thiol, alkyl, alkenyl, and alkynyl.

[0289] Examples of conjugate linkers include but are not limited to pyrrolidine, 8-amino-3,6-dioxaoctanoic acid (ADO), succinimidyl 4-(N-maleimidomethyl) cyclohexane-1-carboxylate (SMCC) and 6-aminohexanoic acid (AHEX or AHA). Other conjugate linkers include but are not limited to substituted or unsubstituted C₁-C₁₀ alkyl, substituted or unsubstituted C₂-C₁₀ alkenyl or substituted or unsubstituted C₂-C₁₀ alkynyl, wherein a nonlimiting list of preferred substituent groups includes hydroxyl, amino, alkoxy, carboxy, benzyl, phenyl, nitro, thiol, thioalkoxy, halogen, alkyl, aryl, alkenyl and alkynyl.

[0290] In certain embodiments, conjugate linkers comprise 1-10 linker-nucleosides. In certain embodiments, such linker-nucleosides are modified nucleosides. In certain embodiments such linker-nucleosides comprise a modified sugar moiety. In certain embodiments, linker-nucleosides are unmodified. In certain embodiments, linker-nucleosides comprise an optionally protected heterocyclic base selected from a purine, substituted purine, pyrimidine or substituted pyrimidine. In certain embodiments, a cleavable moiety is a nucleoside selected from uracil, thymine, cytosine, 4-N-benzoylcytosine, 5-methylcytosine, 4-N-benzoyl-5-methylcytosine, adenine, 6-N-benzoyladenine, guanine and 2-N-isobutyrylguanine. It is typically desirable for linker-nucleosides to be cleaved from the compound after it reaches a target tissue. Accordingly, linker-nucleosides are typically linked to one another and to the remainder of the compound through cleavable bonds. In certain embodiments, such cleavable bonds are phosphodiester bonds.

[0291] Herein, linker-nucleosides are not considered to be part of the oligonucleotide. Accordingly, in embodiments in which an antisense agent or antisense compound comprises an oligonucleotide consisting of a specified number or range of linked nucleosides and/or a specified percent complementarity to a reference nucleic acid and the antisense agent or antisense compound also comprises a conjugate group comprising a conjugate linker comprising linker-nucleosides, those linker-nucleosides are not counted toward the length of the oligonucleotide and are not used in determining the percent complementarity of the oligonucleotide for the reference nucleic acid. For example, an antisense agent or antisense compound may comprise (1) a modified oligonucleotide consisting of 8-30 nucleosides and (2) a conjugate group comprising 1-10 linker-nucleosides that are contiguous with the nucleosides of the modified oligonucleotide. The total number of contiguous linked nucleosides in such an antisense agent or antisense compound is more than 30. Alternatively, an antisense agent or antisense compound may comprise a modified oligonucleotide consisting of 8-30 nucleosides and no conjugate group. The total number of contiguous linked nucleosides in such a compound is no more than 30. Unless otherwise indicated conjugate linkers comprise no more than 10 linker-nucleosides. In certain embodiments, conjugate linkers comprise no more than 5 linker-nucleosides. In certain embodiments, conjugate linkers comprise no more than 3 linker-nucleosides. In certain embodiments, conjugate linkers comprise no more than 2 linker-nucleosides. In certain embodiments, conjugate linkers comprise no more than 1 linker-nucleoside.

[0292] In certain embodiments, it is desirable for a conjugate group to be cleaved from the oligonucleotide. For example, in certain circumstances antisense agents or antisense compounds comprising a particular conjugate moiety are better taken up by a particular cell type, but once the antisense agent or antisense compound has been taken up, it is desirable that the conjugate group be cleaved to release the unconjugated or parent oligonucleotide. Thus, certain conjugate linkers may comprise one or more cleavable moieties. In certain embodiments, a cleavable moiety is a cleavable bond. In certain embodiments, a cleavable moiety is a group of atoms comprising at least one cleavable bond. In certain embodiments, a cleavable moiety comprises a group of atoms having one, two, three, four, or more than four cleavable bonds. In certain embodiments, a cleavable moiety is selectively cleaved inside a cell or subcellular compartment, such as a lysosome. In certain embodiments, a cleavable moiety is selectively cleaved by endogenous enzymes, such as nucleases.

[0293] In certain embodiments, a cleavable bond is selected from among: an amide, an ester, an ether, one or both esters of a phosphodiester, a phosphate ester, a carbamate, or a disulfide. In certain embodiments, a cleavable bond is one or both of the esters of a phosphodiester. In certain embodiments, a cleavable moiety comprises a phosphate or phosphodiester. In certain embodiments, the cleavable moiety is a phosphate linkage between an oligonucleotide and a conjugate moiety or conjugate group.

[0294] In certain embodiments, a cleavable moiety comprises or consists of one or more linker-nucleosides. In certain such embodiments, the one or more linker-nucleosides are linked to one another and/or to the remainder of the antisense agent or antisense compound through cleavable bonds. In certain embodiments, such cleavable bonds are unmodified phosphodiester bonds. In certain embodiments, a cleavable moiety is 2′-deoxy nucleoside that is attached to either the 3′ or 5′-terminal nucleoside of an oligonucleotide by a phosphate internucleoside linkage and covalently attached to the remainder of the conjugate linker or conjugate moiety by a phosphate or phosphorothioate linkage. In certain such embodiments, the cleavable moiety is 2′-deoxyadenosine.

### 3. Certain Cell-Targeting Conjugate Moieties

[0295] In certain embodiments, a conjugate group comprises a cell-targeting conjugate moiety. In certain embodiments, a conjugate group has the general formula:

[chemical structure]

[0296] wherein n is from 1 to about 3, m is 0 when n is 1, m is 1 when n is 2 or greater, j is 1 or 0, and k is 1 or 0.

[0297] In certain embodiments, n is 1, j is 1 and k is 0. In certain embodiments, n is 1, j is 0 and k is 1. In certain embodiments, n is 1, j is 1 and k is 1. In certain embodiments, n is 2, j is 1 and k is 0. In certain embodiments, n is 2, j is 0 and k is 1. In certain embodiments, n is 2, j is 1 and k is 1. In certain embodiments, n is 3, j is 1 and k is 0. In certain embodiments, n is 3, j is 0 and k is 1. In certain embodiments, n is 3, j is 1 and k is 1.

[0298] In certain embodiments, conjugate groups comprise cell-targeting moieties that have at least one tethered ligand. In certain embodiments, cell-targeting moieties comprise two tethered ligands covalently attached to a branching group. In certain embodiments, cell-targeting moieties comprise three tethered ligands covalently attached to a branching group.

[0299] In certain embodiments, the cell-targeting moiety comprises a branching group comprising one or more groups selected from alkyl, amino, oxo, amide, disulfide, polyethylene glycol, ether, thioether and hydroxylamino groups. In certain embodiments, the branching group comprises a branched aliphatic group comprising groups selected from alkyl, amino, oxo, amide, disulfide, polyethylene glycol, ether, thioether and hydroxylamino groups. In certain such embodiments, the branched aliphatic group comprises groups selected from alkyl, amino, oxo, amide and ether groups. In certain such embodiments, the branched aliphatic group comprises groups selected from alkyl, amino and ether groups. In certain such embodiments, the branched aliphatic group comprises groups selected from alkyl and ether groups. In certain embodiments, the branching group comprises a mono or polycyclic ring system.

[0300] In certain embodiments, each tether of a cell-targeting moiety comprises one or more groups selected from alkyl, substituted alkyl, ether, thioether, disulfide, amino, oxo, amide, phosphodiester, and polyethylene glycol, in any combination. In certain embodiments, each tether is a linear aliphatic group comprising one or more groups selected from alkyl, ether, thioether, disulfide, amino, oxo, amide, and polyethylene glycol, in any combination. In certain embodiments, each tether is a linear aliphatic group comprising one or more groups selected from alkyl, phosphodiester, ether, amino, oxo, and amide, in any combination. In certain embodiments, each tether is a linear aliphatic group comprising one or more groups selected from alkyl, ether, amino, oxo, and amid, in any combination. In certain embodiments, each tether is a linear aliphatic group comprising one or more groups selected from alkyl, amino, and oxo, in any combination. In certain embodiments, each tether is a linear aliphatic group comprising one or more groups selected from alkyl and oxo, in any combination. In certain embodiments, each tether is a linear aliphatic group comprising one or more groups selected from alkyl and phosphodiester, in any combination. In certain embodiments, each tether comprises at least one phosphorus linking group or neutral linking group. In certain embodiments, each tether comprises a chain from about 6 to about 20 atoms in length. In certain embodiments, each tether comprises a chain from about 10 to about 18 atoms in length. In certain embodiments, each tether comprises about 10 atoms in chain length.

[0301] In certain embodiments, each ligand of a cell-targeting moiety has an affinity for at least one type of receptor on a target cell. In certain embodiments, each ligand has an affinity for at least one type of receptor on the surface of a mammalian liver cell.

[0302] In certain embodiments, each ligand of a cell-targeting moiety is a carbohydrate, carbohydrate derivative, modified carbohydrate, polysaccharide, modified polysaccharide, or polysaccharide derivative. In certain such embodiments, the conjugate group comprises a carbohydrate cluster (see, e.g., Maier et al., “Synthesis of Antisense Oligonucleotides Conjugated to a Multivalent Carbohydrate Cluster for Cellular Targeting,” Bioconjugate Chemistry, 2003, 14, 18-29 or Rensen et al., “Design and Synthesis of Novel N-Acetylgalactosamine-Terminated Glycolipids for Targeting of Lipoproteins to the Hepatic Asiaglycoprotein Receptor,” J. Med. Chem. 2004, 47, 5798-5808). In certain such embodiments, each ligand is an amino sugar or a thio sugar. For example, amino sugars may be selected from any number of compounds known in the art, such as sialic acid, α-D-galactosamine, β-muramic acid, 2-deoxy-2-methylamino-L-glucopyranose, 4,6-dideoxy-4-formamido-2,3-di-O-methyl-D-mannopyranose, 2-deoxy-2-sulfoamino-D-glucopyranose and N-sulfo-D-glucosamine, and N-glycoloyl-α-neuraminic acid. For example, thio sugars may be selected from 5-Thio-β-D-glucopyranose, methyl 2,3,4-tri-O-acetyl-1-thio-6-O-trityl-α-D-glucopyranoside, 4-thio-β-D-galactopyranose, and ethyl 3,4,6,7-tetra-O-acetyl-2-deoxy-1,5-dithio-α-D-gluco-heptopyranoside.

[0303] Representative United States patents, United States patent application publications, international patent application publications, and other publications that teach the preparation of certain of the above noted conjugate groups, compounds comprising conjugate groups, tethers, conjugate linkers, branching groups, ligands, cleavable moieties as well as other modifications include without limitation, U.S. Pat. Nos. 5,994,517, 6,300,319, 6,660,720, 6,906,182, 7,262,177, 7,491,805, 8,106,022, 7,723,509, US 2006/0148740, US 2011/0123520, WO 2013/033230 and WO 2012/037254, Biessen et al., J. Med. Chem. 1995, 38, 1846-1852, Lee et al., Bioorganic & Medicinal Chemistry 2011, 19, 2494-2500, Rensen et al., J. Biol. Chem. 2001, 276, 37577-37584, Rensen et al., J. Med. Chem. 2004, 47, 5798-5808, Sliedregt et al., J. Med. Chem. 1999, 42, 609-618, and Valentijn et al., Tetrahedron, 1997, 53, 759-770.

[0304] In certain embodiments, antisense agents comprise a conjugate group found in any of the following references: Lee, Carbohydr Res, 1978, 67, 509-514; Connolly et al., J Biol Chem, 1982, 257, 939-945; Pavia et al., Int JPep Protein Res, 1983, 22, 539-548; Lee et al., Biochem, 1984, 23, 4255-4261; Lee et al., Glycoconjugate J, 1987, 4, 317-328; Toyokuni et al., Tetrahedron Lett, 1990, 31, 2673-2676; Biessen et al., J Med Chem, 1995, 38, 1538-1546; Valentijn et al., Tetrahedron, 1997, 53, 759-770; Kim et al., Tetrahedron Lett, 1997, 38, 3487-3490; Lee et al., Bioconjug Chem, 1997, 8, 762-765; Kato et al., Glycobiol, 2001, 11, 821-829; Rensen et al., J Biol Chem, 2001, 276, 37577-37584; Lee et al., Methods Enzymol, 2003, 362, 38-43; Westerlind et al., Glycoconj J, 2004, 21, 227-241; Lee et al., BioorgMed Chem Lett, 2006, 16(19), 5132-5135; Maierhofer et al., BioorgMed Chem, 2007, 15, 7661-7676; Khorev et al., BioorgMed Chem, 2008, 16, 5216-5231; Lee et al., BioorgMed Chem, 2011, 19, 2494-2500; Kornilova et al., Analyt Biochem, 2012, 425, 43-46; Pujol et al., Angew Chemie Int Ed Engl, 2012, 51, 7445-7448; Biessen et al., J Med Chem, 1995, 38, 1846-1852; Sliedregt et al., J Med Chem, 1999, 42, 609-618; Rensen et al., J Med Chem, 2004, 47, 5798-5808; Rensen et al., Arterioscler Thromb Vasc Biol, 2006, 26, 169-175; van Rossenberg et al., Gene Ther, 2004, 11, 457-464; Sato et al., JAm Chem Soc, 2004, 126, 14013-14022; Lee et al., JOrg Chem, 2012, 77, 7564-7571; Biessen et al., FASEB J, 2000, 14, 1784-1792; Rajur et al., Bioconjug Chem, 1997, 8, 935-940; Duff et al., Methods Enzymol, 2000, 313, 297-321; Maier et al., Bioconjug Chem, 2003, 14, 18-29; Jayaprakash et al., Org Lett, 2010, 12, 5410-5413; Manoharan, Antisense Nucleic Acid Drug Dev, 2002, 12, 103-128; Merwin et al., Bioconjug Chem, 1994, 5, 612-620; Tomiya et al., Bioorg Med Chem, 2013, 21, 5275-5281; International applications WO1998/013381; WO2011/038356; WO1997/046098; WO2008/098788; WO2004/101619; WO2012/037254; WO2011/120053; WO2011/100131; WO2011/163121; WO2012/177947; WO2013/033230; WO2013/075035; WO2012/083185; WO2012/083046; WO2009/082607; WO2009/134487; WO2010/144740; WO2010/148013; WO1997/020563; WO2010/088537; WO2002/043771; WO2010/129709; WO2012/068187; WO2009/126933; WO2004/024757; WO2010/054406; WO2012/089352; WO2012/089602; WO2013/166121; WO2013/165816; U.S. Pat. Nos. 4,751,219; 8,552,163; 6,908,903; 7,262,177; 5,994,517; 6,300,319; 8,106,022; 7,491,805; 7,491,805; 7,582,744; 8,137,695; 6,383,812; 6,525,031; 6,660,720; 7,723,509; 8,541,548; 8,344,125; 8,313,772; 8,349,308; 8,450,467; 8,501,930; 8,158,601; 7,262,177; 6,906,182; 6,620,916; 8,435,491; 8,404,862; 7,851,615; Published U.S. patent application Publications US2011/0097264; US2011/0097265; US2013/0004427; US2005/0164235; US2006/0148740; US2008/0281044; US2010/0240730; US2003/0119724; US2006/0183886; US2008/0206869; US2011/0269814; US2009/0286973; US2011/0207799; US2012/0136042; US2012/0165393; US2008/0281041; US2009/0203135; US2012/0035115; US2012/0095075; US2012/0101148; US2012/0128760; US2012/0157509; US2012/0230938; US2013/0109817; US2013/0121954; US2013/0178512; US2013/0236968; US2011/0123520; US2003/0077829; US2008/0108801; and US2009/0203132.

[0305] In certain embodiments, antisense agents comprising a conjugate group are single-stranded. In certain embodiments, antisense agents comprising a conjugate group are double-stranded.

### Compositions and Methods for Formulating Pharmaceutical Compositions

[0306] Antisense agents described herein may be admixed with pharmaceutically acceptable active or inert substances for the preparation of pharmaceutical compositions or formulations. Compositions and methods for the formulation of pharmaceutical compositions are dependent upon a number of criteria, including, but not limited to, route of administration, extent of disease, or dose to be administered.

[0307] An antisense agent described herein targeted to a NOX4 nucleic acid can be utilized in pharmaceutical compositions by combining the antisense agent with a suitable pharmaceutically acceptable diluent or carrier. In certain embodiments, a pharmaceutically acceptable diluent is water, such as sterile water suitable for injection. Accordingly, in one embodiment, employed in the methods described herein is a pharmaceutical composition comprising an antisense agent targeted to a NOX4 nucleic acid and a pharmaceutically acceptable diluent. In certain embodiments, the pharmaceutically acceptable diluent is water. In certain embodiments, the antisense agent comprises or consists of a modified oligonucleotide provided herein.

[0308] Pharmaceutical compositions comprising antisense agents provided herein encompass any pharmaceutically acceptable salts, esters, or salts of such esters, or any other oligonucleotide which, upon administration to a subject, including a human, is capable of providing (directly or indirectly) the biologically active metabolite or residue thereof. Suitable pharmaceutically acceptable salts include, but are not limited to, sodium and potassium salts.

[0309] A prodrug can include the incorporation of additional nucleosides at one or both ends of an antisense agent which are cleaved by endogenous nucleases within the body, to form the active compound.

[0310] In certain embodiments, the antisense agents or compositions further comprise a pharmaceutically acceptable carrier or diluent.

### Certain Combinations and Combination Therapies

[0311] In certain embodiments, an antisense agent described herein is co-administered with one or more secondary agents. In certain embodiments, such second agents are designed to treat the same disease, disorder, or condition as the first agent described herein. In certain embodiments, such second agents are designed to treat a different disease, disorder, or condition as the first agent described herein. In certain embodiments, a first agent is designed to treat an undesired side effect of a second agent. In certain embodiments, second agents are co-administered with the antisense agent to treat an undesired effect of the antisense agent. In certain embodiments, such second agents are designed to treat an undesired side effect of one or more pharmaceutical compositions as described herein. In certain embodiments, second agents are co-administered with the antisense agent to produce a combinational effect. In certain embodiments, second agents are co-administered with the antisense agent to produce a synergistic effect. In certain embodiments, the co-administration of the antisense and second agents permits use of lower dosages than would be required to achieve a therapeutic or prophylactic effect if the agents were administered as independent therapy.

[0312] In certain embodiments, a secondary agent is a vasodilator, such as, for example Treprostinil, prostacyclin, or an endothelin receptor antagonist. In certain embodiments, a secondary agent is a diuretic. In certain embodiments, a secondary agent is a short- or long-acting bronchodilator, a steroid, or a PDE4 inhibitor. In certain embodiments, a secondary agent is oxygen.

### EXAMPLES

### Non-Limiting Disclosure and Incorporation by Reference

[0313] While certain antisense agents, compositions and methods described herein have been described with specificity in accordance with certain embodiments, the following examples serve only to illustrate the compounds described herein and are not intended to limit the same. Each of the references recited in the present application is incorporated herein by reference in its entirety.

### Example 1: Effect of 3-10-3 cEt, Uniform Phosphorothioate Modified Oligonucleotides on Mouse NOX4 RNA In Vitro, Single Dose

[0314] Modified oligonucleotides complementary to mouse NOX4 nucleic acid were designed and tested for their single dose effects on NOX4 RNA in vitro. The modified oligonucleotides were tested in a series of experiments that had the same culture conditions.

[0315] The modified oligonucleotides in the table below are 3-10-3 cEt modified oligonucleotides with uniform phosphorothioate internucleoside linkages. The modified oligonucleotides are 16 nucleosides in length, wherein the central gap segment consists of ten 2′-β-D-deoxynucleosides, and wherein the 5′ and 3′ wing segments each consist of three cEt nucleosides. The sugar motif for the modified oligonucleotides is (from 5′ to 3′): kkkddddddddddkkk; wherein each “d” represents a 2′-β-D-deoxyribosyl sugar moiety, and each “k” represents a cEt sugar moiety. The internucleoside linkage motif for the modified oligonucleotides is (from 5′ to 3′): sssssssssssssss; wherein each “s” represents a phosphorothioate internucleoside linkage. Each cytosine residue is a 5-methylcytosine.

[0316] “Start site” indicates the 5′-most nucleoside to which the modified oligonucleotide is complementary in the target nucleic acid sequence. “Stop site” indicates the 3′-most nucleoside to which the modified oligonucleotide is complementary in the target nucleic acid sequence. Each modified oligonucleotide listed in the table below is 100% complementary to SEQ ID NO: 1 (GENBANK Accession No. NT_039433.8, truncated from nucleosides 4994000 to 5149000), to SEQ ID NO: 2 (GENBANK Accession No. NM_001285833.1), or to both. “N/A” indicates that the modified oligonucleotide is not 100% complementary to that particular target nucleic acid sequence.

[0317] Cultured b.END cells were treated with modified oligonucleotide at a concentration of 4000 nM by electroporation at a density of 20,000 cells per well. After a treatment period of approximately 24 hours, total RNA was isolated from the cells and NOX4 RNA levels were measured by quantitative real-time RT-PCR. NOX4 RNA levels were measured by mouse primer-probe set RTS35168 (forward sequence TCCTACTGAAACCAAAGCAACA, designated herein as SEQ ID NO: 6; reverse sequence AATGAAGGGCAGAATCTCAGAG, designated herein as SEQ ID NO: 7; probe sequence AGACTGGACAGAACGATTCCGGGA, designated herein as SEQ ID NO: 8). NOX4 RNA levels were normalized to total RNA content, as measured by RIBOGREEN®. Reduction of NOX4 RNA is presented in the table below as percent NOX4 RNA relative to the amount ofNOX4 RNA in untreated control cells (% UTC). The values marked with a “t” indicate that the modified oligonucleotide is complementary to the amplicon region of the primer-probe set. Additional assays may be used to measure the potency and efficacy of the modified oligonucleotides complementary to the amplicon region.

[0318] Each separate experimental analysis described in this example is identified by a letter ID in the table column below labeled “AID” (Analysis ID).

TABLE 1
Reduction of mouse NOX4 RNA by 3-10-3 cEt modified oligonucleotides with uniform
phosphorothioate internucleoside linkages at a concentration of 4000 nM in b.END cells

| | SEQ ID | SEQ ID | SEQ ID | SEQ ID | | | | |
|---|---|---|---|---|---|---|---|---|
| | No: 1 | No: 1 | No: 2 | No: 2 | | NOX4 | | |
| Compound | Start | Stop | Start | Stop | | (% | | SEQ |
| Number | Site | Site | Site | Site | Sequence (5′ to 3′) | UTC) | AID | ID NO |
| 805993 | 1341 | 1356 | 15 | 30 | TCCCACCGCGCTGCTC | 70 | A | 12 |
| 805997 | 1441 | 1456 | 115 | 130 | GGCAGCAGATCCAGGG | 67 | A | 13 |
| 806001 | 1525 | 1540 | 199 | 214 | CTCCAGGACACCGCCA | 37 | A | 14 |
| 806005 | 2186 | 2201 | 275 | 290 | CCAGAAAAGTAGAACG | 14 | A | 15 |
| 806013 | 50510 | 50525 | 395 | 410 | AAAGGATGAGGCTGCA | 13 | A | 16 |
| 806017 | N/A | N/A | 452 | 467 | TGCTAGGGACCTTCTG | 31 | A | 17 |
| 806021 | 52190 | 52205 | 515 | 530 | AGATAGTTACACCACA | 41 | A | 18 |
| 806029 | 59591 | 59606 | 618 | 633 | TGGTATCTTGCTGCAT | 29 | A | 19 |
| 806033 | 68758 | 68773 | 685 | 700 | CACCACCATGCAGACA | 26 | A | 20 |
| 806037 | 71911 | 71926 | 744 | 759 | ATATCATAATTAGAAA | 97 | A | 21 |
| 806041 | 71968 | 71983 | 801 | 816 | ACATGCAACAGCAGCA | 24 | A | 22 |
| 806045 | 76252 | 76267 | 851 | 866 | CAGGAGGGTGAGTGTC | 58 | A | 23 |
| 806049 | 76332 | 76347 | 931 | 946 | CAAAGATCCATGAAAA | 53 | A | 24 |
| 806053 | 76391 | 76406 | 990 | 1005 | AGGCAAATCTTCACAA | 22 | A | 25 |
| 806057 | 78317 | 78332 | 1046 | 1061 | GTCCAGAAATCCAAAT | 37 | A | 26 |
| 806061 | 78377 | 78392 | 1106 | 1121 | TGACAGGTTTGTTGCT | 25 | A | 27 |
| 806065 | 78426 | 78441 | 1155 | 1170 | ATACGGAGTTCCATTA | 31 | A | 28 |
| 806069 | 78615 | 78630 | 1209 | 1224 | GGGCAATGGAGAATAA | 26 | A | 29 |
| 806073 | 93640 | 93655 | 1390 | 1405 | TGCTTTGGTTTCAGTA | 7+ | A | 30 |
| 806077 | 115420 | 115435 | 1460 | 1475 | ATGGAGGCAGTAGCAA | 11+ | A | 31 |
| 806081 | 115474 | 115489 | 1514 | 1529 | ACTTAGGGTAATTTCT | 55 | A | 32 |
| 806085 | 124734 | 124749 | 1566 | 1581 | TCATAGTTCAGTGACT | 34 | A | 33 |
| 806089 | 124791 | 124806 | 1623 | 1638 | TTTAGTATCGATGCAA | 40 | A | 34 |
| 806093 | 126629 | 126644 | 1680 | 1695 | ACCCAGATAAAGTACA | 44 | A | 35 |
| 806097 | 126683 | 126698 | 1734 | 1749 | TGCAACACACAGAGTA | 26 | A | 36 |
| 806105 | 130881 | 130896 | 1847 | 1862 | TCGAATTCAGTGTGTG | 14 | A | 37 |
| 806109 | 130937 | 130952 | 1903 | 1918 | ACATTTTGCTATTTCA | 33 | A | 38 |
| 806113 | 151488 | 151503 | 1966 | 1981 | ATGAAGAGTCTTGGAA | 30 | A | 39 |
| 806117 | 151538 | 151553 | 2016 | 2031 | TTATTGTATTCAAATT | 106 | A | 40 |
| 806121 | 151586 | 151601 | 2064 | 2079 | CTCTTTAAAGTCCCCA | 17 | A | 41 |
| 806125 | 151639 | 151654 | 2117 | 2132 | GCACAGCTGTTTGATT | 61 | A | 42 |
| 806129 | 151714 | 151729 | 2192 | 2207 | TGCCATTTTGCCACAT | 15 | A | 43 |
| 806133 | 151776 | 151791 | 2254 | 2269 | ATCAAAATGTGAATCA | 29 | A | 44 |
| 806137 | 151834 | 151849 | 2312 | 2327 | CTTGAATTTCCCATAA | 26 | A | 45 |
| 806141 | 151893 | 151908 | 2371 | 2386 | AAAGAGGGCTGCAGCT | 25 | A | 46 |
| 806149 | 152001 | 152016 | 2479 | 2494 | ATCCAAATGAAAGCTA | 44 | A | 47 |
| 806153 | 152062 | 152077 | 2540 | 2555 | ACCCGTATCGATACAA | 20 | A | 48 |
| 806157 | 152108 | 152123 | 2586 | 2601 | CTGCAGCGAGGCAGGA | 47 | A | 49 |
| 806161 | 152160 | 152175 | 2638 | 2653 | AGATACTACATCCACA | 17 | A | 50 |
| 806165 | 152219 | 152234 | 2697 | 2712 | CAAGATTGGCTAAGGG | 23 | A | 51 |
| 806169 | 152268 | 152283 | 2746 | 2761 | CTAAATTGAACAAATC | 91 | A | 52 |
| 806173 | 152317 | 152332 | 2795 | 2810 | GGTTTTTAAGGATAAG | 18 | A | 53 |
| 806177 | 152381 | 152396 | 2859 | 2874 | TCAAAGTGAGTCAAAG | 32 | A | 54 |
| 806181 | 152435 | 152450 | 2913 | 2928 | TGTAGAAAGCAAAGCA | 10 | A | 55 |
| 806185 | 152487 | 152502 | 2965 | 2980 | TATTAGTGATTCTAAA | 98 | A | 56 |
| 806189 | 152534 | 152549 | 3012 | 3027 | GACTTAAATCTAGTAA | 58 | A | 57 |
| 806193 | 152584 | 152599 | 3062 | 3077 | CCTGAATATTAAAAAA | 76 | A | 58 |
| 806197 | 152636 | 152651 | 3114 | 3129 | ATAAACTGTATGAATA | 69 | A | 59 |
| 806201 | 152687 | 152702 | 3165 | 3180 | AGCAATGTGTCCTATT | 10 | A | 60 |
| 806205 | 152731 | 152746 | 3209 | 3224 | TGATATACAAAAGATT | 112 | A | 61 |
| 806209 | 152779 | 152794 | 3257 | 3272 | ACTGAATCACATGAAA | 61 | A | 62 |
| 806213 | 152832 | 152847 | 3310 | 3325 | AATATACAGGTGGTTA | 24 | A | 63 |
| 806217 | 152885 | 152900 | 3363 | 3378 | CATAGGAGGGATAGGA | 47 | A | 64 |
| 806221 | 152931 | 152946 | 3409 | 3424 | AGTTTATGTCTCCACA | 8 | A | 65 |
| 806225 | 152989 | 153004 | 3467 | 3482 | TGTAGTATGTGTTTTG | 11 | A | 66 |
| 806229 | 153060 | 153075 | 3538 | 3553 | AATCAGTATTGCACAT | 19 | A | 67 |
| 806233 | 153110 | 153125 | 3588 | 3603 | GAAATGTGATGAATTC | 41 | A | 68 |
| 806237 | 153159 | 153174 | 3637 | 3652 | ACACAAGTCTGAAATA | 35 | A | 69 |
| 806241 | 153203 | 153218 | 3681 | 3696 | TGCACTGGAGTTTAGA | 26 | A | 70 |
| 806245 | 153255 | 153270 | 3733 | 3748 | AATTTATTCCTGTTCA | 25 | A | 71 |
| 806249 | 153306 | 153321 | 3784 | 3799 | ATAGAATCTAAAAAGA | 98 | A | 72 |
| 806253 | 153357 | 153372 | 3835 | 3850 | TATTACCATCAAAATT | 91 | A | 73 |
| 806257 | N/A | N/A | 342 | 357 | CACAATCGCCCAACAT | 67 | A | 74 |
| 806261 | 81847 | 81862 | 1306 | 1321 | GAAACTGTATATCCAT | 10 | A | 75 |
| 806265 | 86397 | 86412 | 1361 | 1376 | AGGCATGGTTCATCTT | 35 | A | 76 |
| 806269 | 18518 | 18533 | N/A | N/A | TATTGGTAAAAACTGG | 34 | A | 77 |
| 806273 | 32930 | 32945 | N/A | N/A | ACTTACATGGACACAT | 32 | A | 78 |
| 806277 | 44893 | 44908 | N/A | N/A | AGTATTGGAATTCAGG | 7 | A | 79 |
| 806281 | 48551 | 48566 | N/A | N/A | GTCTGACCCTTACCTT | 26 | A | 80 |
| | 68812 | 68827 | | | | | | |
| 806285 | 72496 | 72511 | N/A | N/A | GTTCATACTGGGTTAC | 5 | A | 81 |
| 806289 | 93921 | 93936 | N/A | N/A | ACTGACAATAAGAGGC | 8 | A | 82 |
| 806293 | 96139 | 96154 | N/A | N/A | GCCTTTAAATACAAAA | 40 | A | 83 |
| 806297 | 124106 | 124121 | N/A | N/A | CTTAACTACACAGAAA | 67 | A | 84 |
| 806301 | 141137 | 141152 | N/A | N/A | CCCCACCGAGGGATCT | 87 | A | 85 |
| 805994 | 1352 | 1367 | 26 | 41 | CTCCACCCGGCTCCCA | 61 | B | 86 |
| 805998 | 1457 | 1472 | 131 | 146 | AGCGATCAGTGGCCGG | 43 | B | 87 |
| 806006 | 2197 | 2212 | 286 | 301 | AGGAAGGTTTTCCAGA | 28 | B | 88 |
| 806010 | 50476 | 50491 | 361 | 376 | TGCAGATGCTCTGCTT | 50 | B | 89 |
| 806014 | 50521 | 50536 | 406 | 421 | GCACATAGGTAAAAGG | 21 | B | 90 |
| 806018 | 52147 | 52162 | 472 | 487 | CAACAATCTTCTTGTT | 63 | B | 91 |
| 806026 | 59550 | 59565 | 577 | 592 | GTTCACTGAAAAGTTG | 23 | B | 92 |
| 806030 | 61405 | 61420 | 639 | 654 | AGCTTTCTGGGATCCT | 24 | B | 93 |
| 806034 | 68769 | 68784 | 696 | 711 | AGGAACAATACCACCA | 7 | B | 94 |
| 806042 | N/A | N/A | 812 | 827 | AACCACCTGAAACATG | 52 | B | 95 |
| 806046 | 76263 | 76278 | 862 | 877 | ACTAATGCAGCCAGGA | 18 | B | 96 |
| 806050 | 76346 | 76361 | 945 | 960 | GAAAACCCTCGAGGCA | 19 | B | 97 |
| 806054 | 76407 | 76422 | 1006 | 1021 | GAACTTGGGTTCTTCC | 53 | B | 98 |
| 806058 | 78331 | 78346 | 1060 | 1075 | ATAAAGGCACAAAGGT | 23 | B | 99 |
| 806062 | 78390 | 78405 | 1119 | 1134 | ACTGAGATGATGGTGA | 16 | B | 100 |
| 806066 | 78447 | 78462 | 1176 | 1191 | GCTTTAAAGTTTTCTT | 46 | B | 101 |
| 806070 | 78633 | 78648 | 1227 | 1242 | TCTAATGCTGATACAC | 13 | B | 102 |
| 806074 | 93653 | 93668 | 1403 | 1418 | GGACACCAAATGTTGC | 2+ | B | 103 |
| 806078 | 115438 | 115453 | 1478 | 1493 | TCTCAGAGTCTTGACT | 33+ | B | 104 |
| 806082 | N/A | N/A | 1525 | 1540 | ATCAATGTATAACTTA | 39 | B | 105 |
| 806086 | 124745 | 124760 | 1577 | 1592 | AGAGACTAACTTCATA | 26 | B | 106 |
| 806090 | N/A | N/A | 1636 | 1651 | ATCCAGTAGAGTGTTT | 68 | B | 107 |
| 806094 | 126650 | 126665 | 1701 | 1716 | AATGATTGGATGTCTC | 38 | B | 108 |
| 806106 | 130892 | 130907 | 1858 | 1873 | AATGAAAAGTCTCGAA | 54 | B | 109 |
| 806110 | N/A | N/A | 1924 | 1939 | TCCAACTGTTTTCCCT | 24 | B | 110 |
| 806114 | 151501 | 151516 | 1979 | 1994 | GGTTACTCAAACTATG | 11 | B | 111 |
| 806118 | 151550 | 151565 | 2028 | 2043 | CTGAAGGATTCTTTAT | 50 | B | 112 |
| 806122 | 151598 | 151613 | 2076 | 2091 | TTGCACTTGTTCCTCT | 16 | B | 113 |
| 806126 | 151666 | 151681 | 2144 | 2159 | AGCAAACCCTTGGTAT | 15 | B | 114 |
| 806130 | 151725 | 151740 | 2203 | 2218 | CAGATTAACCATGCCA | 6 | B | 115 |
| 806134 | 151787 | 151802 | 2265 | 2280 | TTAATTTGCTCATCAA | 13 | B | 116 |
| 806138 | 151846 | 151861 | 2324 | 2339 | TGTAAGAGACTTCTTG | 32 | B | 117 |
| 806142 | 151905 | 151920 | 2383 | 2398 | CGAAAACAATTTAAAG | 95 | B | 118 |
| 806146 | 151965 | 151980 | 2443 | 2458 | GAAAATGGAGTCTGAG | 31 | B | 119 |
| 806150 | 152023 | 152038 | 2501 | 2516 | TCCCAGTGTTTGCCTG | 33 | B | 120 |
| 806154 | 152073 | 152088 | 2551 | 2566 | AGATATGAAGTACCCG | 12 | B | 121 |
| 806158 | 152119 | 152134 | 2597 | 2612 | GATTAGGAACACTGCA | 25 | B | 122 |
| 806162 | 152171 | 152186 | 2649 | 2664 | CAAACATAAGTAGATA | 47 | B | 123 |
| 806166 | 152230 | 152245 | 2708 | 2723 | ATAATTGTGTCCAAGA | 15 | B | 124 |
| 806170 | 152283 | 152298 | 2761 | 2776 | TACTAAGCCATGGGAC | 27 | B | 125 |
| 806174 | 152330 | 152345 | 2808 | 2823 | TACAAAGCTCTTTGGT | 21 | B | 126 |
| 806178 | 152392 | 152407 | 2870 | 2885 | CTTATCTGAAATCAAA | 62 | B | 127 |
| 806182 | 152451 | 152466 | 2929 | 2944 | GAAGAAGTTCTACTTT | 30 | B | 128 |
| 806186 | 152499 | 152514 | 2977 | 2992 | GTGCAAAAATAATATT | 98 | B | 129 |
| 806190 | 152550 | 152565 | 3028 | 3043 | GATCACATGAACAGGG | 16 | B | 130 |
| 806194 | 152603 | 152618 | 3081 | 3096 | GTAAATTTTCCTTCTG | 13 | B | 131 |
| 806198 | 152647 | 152662 | 3125 | 3140 | AAATTAAGTTGATAAA | 91 | B | 132 |
| 806202 | 152698 | 152713 | 3176 | 3191 | GTACTAATTTCAGCAA | 11 | B | 133 |
| 806206 | 152742 | 152757 | 3220 | 3235 | TTGTAATCATGTGATA | 81 | B | 134 |
| 806210 | 152799 | 152814 | 3277 | 3292 | TAGTATGCTTGTCTGT | 12 | B | 135 |
| 806214 | 152847 | 152862 | 3325 | 3340 | ATATATGTGTAACTAA | 76 | B | 136 |
| 806218 | 152897 | 152912 | 3375 | 3390 | TTGCACATTGCCCATA | 20 | B | 137 |
| 806222 | 152942 | 152957 | 3420 | 3435 | TATGATGTCATAGTTT | 29 | B | 138 |
| 806226 | 153016 | 153031 | 3494 | 3509 | TATGAGGTTTATTTTT | 69 | B | 139 |
| 806230 | 153071 | 153086 | 3549 | 3564 | GATTGGTAAGGAATCA | 38 | B | 140 |
| 806234 | 153121 | 153136 | 3599 | 3614 | CCTGAATTTTTGAAAT | 77 | B | 141 |
| 806238 | 153170 | 153185 | 3648 | 3663 | CTCAACATAGCACACA | 27 | B | 142 |
| 806242 | 153218 | 153233 | 3696 | 3711 | ATAGATCCTTGAACAT | 27 | B | 143 |
| 806246 | 153266 | 153281 | 3744 | 3759 | GATAAAGCTTTAATTT | 69 | B | 144 |
| 806250 | 153320 | 153335 | 3798 | 3813 | CAGTAACCACCACCAT | 13 | B | 145 |
| 806254 | 153360 | 153375 | 3838 | 3853 | ATTTATTACCATCAAA | 57 | B | 146 |
| 806258 | N/A | N/A | 1254 | 1269 | AGCATTGTGAGAGTAA | 31 | B | 147 |
| 806262 | 81858 | 81873 | 1317 | 1332 | CTACAGACAAAGAAAC | 60 | B | 148 |
| 806266 | N/A | N/A | 1372 | 1387 | ACACAGTAAGAAGGCA | 98+ | B | 149 |
| 806270 | 21665 | 21680 | N/A | N/A | TCAGAAATACAGGTGA | 86 | B | 150 |
| 806274 | 33911 | 33926 | N/A | N/A | GATAAAGGACTTACAA | 39 | B | 151 |
| 806278 | 48071 | 48086 | N/A | N/A | GTTACTATCACTCATA | 24 | B | 152 |
| 806282 | 70181 | 70196 | N/A | N/A | ACCATATAAACATTTT | 25 | B | 153 |
| 806286 | 82671 | 82686 | N/A | N/A | GTTTATGAATTCTGAT | 85 | B | 154 |
| 806290 | 93995 | 94010 | N/A | N/A | CTCAATAACACCATGA | 22 | B | 155 |
| 806294 | 102047 | 102062 | N/A | N/A | TCACATTGGCAATTAA | 13 | B | 156 |
| 806298 | 128170 | 128185 | N/A | N/A | AGAACCATCTTTGTTC | 24 | B | 157 |
| | 140404 | 140419 | | | | | | |
| 806302 | 141743 | 141758 | N/A | N/A | AAAGATGTCATGCAAT | 66 | B | 158 |
| 805995 | 1383 | 1398 | 57 | 72 | CTGTACTGAGTCTGGA | 118 | C | 159 |
| 805999 | 1470 | 1485 | 144 | 159 | CAGGACCGAAAGGAGC | 32 | C | 160 |
| 806003 | N/A | N/A | 247 | 262 | CAAATGAGCAGGCAGA | 37 | C | 161 |
| 806007 | 2227 | 2242 | 316 | 331 | TAGTAGTATTCTGGCC | 48 | C | 162 |
| 806011 | 50488 | 50503 | 373 | 388 | GTTCAGGACAGATGCA | 15 | C | 163 |
| 806015 | 50536 | 50551 | 421 | 436 | AGCCAGGACTGTCCGG | 35 | C | 164 |
| 806019 | 52168 | 52183 | 493 | 508 | GTGTAGAGTCTTGCTT | 18 | C | 165 |
| 806023 | N/A | N/A | 539 | 554 | CTACATGCACACCTGA | 18 | C | 166 |
| 806027 | 59567 | 59582 | 594 | 609 | AGGAAATCTTCACTGT | 24 | C | 167 |
| 806031 | N/A | N/A | 658 | 673 | AGGAATGGTTGTGAAG | 42 | C | 168 |
| 806035 | 68780 | 68795 | 707 | 722 | CTGTAACCATGAGGAA | 44 | C | 169 |
| 806039 | 71936 | 71951 | 769 | 784 | GAAGAGGTTGTGAGTA | 30 | C | 170 |
| 806043 | 76226 | 76241 | 825 | 840 | TGATACTTCAACAAAC | 40 | C | 171 |
| 806047 | 76289 | 76304 | 888 | 903 | ATATTCTGGGATGATG | 25 | C | 172 |
| 806051 | 76363 | 76378 | 962 | 977 | AACGATCTTCTAATTT | 42 | C | 173 |
| 806055 | 76418 | 76433 | 1017 | 1032 | AAATGAGCTTGGAACT | 69 | C | 174 |
| 806059 | 78349 | 78364 | 1078 | 1093 | GTAAAGTCTCTCCGCA | 7 | C | 175 |
| 806063 | 78401 | 78416 | 1130 | 1145 | GATGATTGATGACTGA | 10 | C | 176 |
| 806067 | 78458 | 78473 | 1187 | 1202 | GGCCAGGTCTTGCTTT | 58 | C | 177 |
| 806071 | 78647 | 78662 | 1241 | 1256 | TAAATGGGTGGTTTTC | 69 | C | 178 |
| 806075 | 93664 | 93679 | 1414 | 1429 | TACTTTAAAGTGGACA | 27+ | C | 179 |
| 806079 | 115451 | 115466 | 1491 | 1506 | ATGAAGGGCAGAATCT | 22+ | C | 180 |
| 806083 | 124704 | 124719 | 1536 | 1551 | CCAAATGGACCATCAA | 24 | C | 181 |
| 806095 | 126661 | 126676 | 1712 | 1727 | CAAACCACTGGAATGA | 34 | C | 182 |
| 806099 | 129045 | 129060 | 1770 | 1785 | ACAAAGTCAGGTCTGT | 27 | C | 183 |
| 806103 | N/A | N/A | 1819 | 1834 | AATTATCTTCTGAATC | 91 | C | 184 |
| 806111 | 151457 | 151472 | 1935 | 1950 | CAGCAGAAAACTCCAA | 59 | C | 185 |
| 806115 | 151514 | 151529 | 1992 | 2007 | TATGAGTTGTTCCGGT | 15 | C | 186 |
| 806119 | 151563 | 151578 | 2041 | 2056 | CCTAAGGTTTCAGCTG | 26 | C | 187 |
| 806123 | 151614 | 151629 | 2092 | 2107 | TTCTAAGTCTTAGAAA | 124 | C | 188 |
| 806127 | 151677 | 151692 | 2155 | 2170 | TAATCATAAATAGCAA | 89 | C | 189 |
| 806131 | 151753 | 151768 | 2231 | 2246 | AGATATTCTTCAGGGC | 9 | C | 190 |
| 806135 | 151801 | 151816 | 2279 | 2294 | CTAACGGCATTCTTTT | 25 | C | 191 |
| 806139 | 151866 | 151881 | 2344 | 2359 | TGTAAGTGAGTTCAGC | 15 | C | 192 |
| 806143 | 151920 | 151935 | 2398 | 2413 | TTGAATGTGTTCAACC | 8 | C | 193 |
| 806147 | 151976 | 151991 | 2454 | 2469 | TGCACAACCTAGAAAA | 29 | C | 194 |
| 806151 | 152037 | 152052 | 2515 | 2530 | CTACAGTTTCAACCTC | 19 | C | 195 |
| 806155 | 152084 | 152099 | 2562 | 2577 | AGTGAAGCAGCAGATA | 17 | C | 196 |
| 806159 | 152136 | 152151 | 2614 | 2629 | AGCTTTGTGAGCATAT | 13 | C | 197 |
| 806163 | 152182 | 152197 | 2660 | 2675 | AGGATAAGATGCAAAC | 10 | C | 198 |
| 806167 | 152245 | 152260 | 2723 | 2738 | AAACAGTTCTATTAAA | 82 | C | 199 |
| 806171 | 152295 | 152310 | 2773 | 2788 | GCACATTTTCATTACT | 9 | C | 200 |
| 806175 | 152345 | 152360 | 2823 | 2838 | GTGTTTGGTGCAAGAT | 13 | C | 201 |
| 806179 | 152407 | 152422 | 2885 | 2900 | ATGAATTCAGCATCTC | 8 | C | 202 |
| 806183 | 152462 | 152477 | 2940 | 2955 | GAATAAATACTGAAGA | 60 | C | 203 |
| 806187 | 152511 | 152526 | 2989 | 3004 | TGATATCAAACAGTGC | 6 | C | 204 |
| 806191 | 152562 | 152577 | 3040 | 3055 | ATAAACTGATTGGATC | 22 | C | 205 |
| 806195 | 152614 | 152629 | 3092 | 3107 | TTCTTAAGGTAGTAAA | 51 | C | 206 |
| 806199 | 152659 | 152674 | 3137 | 3152 | TAATTATATACCAAAT | 112 | C | 207 |
| 806203 | 152709 | 152724 | 3187 | 3202 | CATAAGTTAAGGTACT | 71 | C | 208 |
| 806207 | 152754 | 152769 | 3232 | 3247 | TAACAGGATTTATTGT | 101 | C | 209 |
| 806211 | 152810 | 152825 | 3288 | 3303 | GCTAAATGTTTTAGTA | 51 | C | 210 |
| 806219 | 152908 | 152923 | 3386 | 3401 | CTACATGAGCATTGCA | 25 | C | 211 |
| 806223 | 152953 | 152968 | 3431 | 3446 | GACAGCATTGCTATGA | 13 | C | 212 |
| 806227 | 153036 | 153051 | 3514 | 3529 | GACAAGCCCAAGTTTT | 35 | C | 213 |
| 806231 | 153082 | 153097 | 3560 | 3575 | AAATAAGTTATGATTG | 99 | C | 214 |
| 806235 | 153132 | 153147 | 3610 | 3625 | TGTAAGTTTGACCTGA | 17 | C | 215 |
| 806239 | 153181 | 153196 | 3659 | 3674 | AAGGAAGTTCACTCAA | 17 | C | 216 |
| 806243 | 153229 | 153244 | 3707 | 3722 | ATGTTTAACATATAGA | 84 | C | 217 |
| 806247 | 153277 | 153292 | 3755 | 3770 | TCTATATGTGTGATAA | 51 | C | 218 |
| 806251 | 153331 | 153346 | 3809 | 3824 | GATTTATACAACAGTA | 33 | C | 219 |
| 806255 | 153363 | 153378 | 3841 | 3856 | AATATTTATTACCATC | 87 | C | 220 |
| 806259 | 81822 | 81837 | 1281 | 1296 | TGCCAGGGCTGCCATC | 13 | C | 221 |
| 806263 | N/A | N/A | 1332 | 1347 | TGGCATGCAGCATCAC | 39 | C | 222 |
| 806267 | 10264 | 10279 | N/A | N/A | GAAACATTGTGTGTGA | 7 | C | 223 |
| 806271 | 27151 | 27166 | N/A | N/A | TGACAAGCCAAATTGA | 26 | C | 224 |
| 806275 | 34580 | 34595 | N/A | N/A | TGGAAGAAGTTAAGAA | 61 | C | 225 |
| 806279 | 53290 | 53305 | N/A | N/A | TAATGATACTCAGCAA | 39 | C | 226 |
| 806283 | 71014 | 71029 | N/A | N/A | GTGCAGATAATGGTGA | 16 | C | 227 |
| 806287 | 86295 | 86310 | N/A | N/A | AGCCAGAAGGGACGAG | 25 | C | 228 |
| 806291 | 95515 | 95530 | N/A | N/A | GACCATTAGGCCTTCC | 12 | C | 229 |
| 806295 | 114599 | 114614 | N/A | N/A | TAGTAAAAGAAGCAAC | 103 | C | 230 |
| 806299 | 128172 | 128187 | N/A | N/A | ATAGAACCATCTTTGT | 15 | C | 231 |
| | 140406 | 140421 | | | | | | |
| 806303 | 148258 | 148273 | N/A | N/A | GTGTACAGGTGAGTGT | 83 | C | 232 |
| 806215 | 152863 | 152878 | 3341 | 3356 | TCCAAGGATAAAAAAA | 61 | C | 233 |
| 805996 | 1398 | 1413 | 72 | 87 | GGCGAGGGTCAAAGGC | 10 | D | 234 |
| 806000 | 1514 | 1529 | 188 | 203 | CGCCATGCCGCCGGCG | 80 | D | 235 |
| 806004 | 2169 | 2184 | 258 | 273 | TTAGGGACAGCCAAAT | 10 | D | 236 |
| 806008 | 2242 | 2257 | 331 | 346 | AACATTTGGTGAATGT | 89 | D | 237 |
| 806012 | 50499 | 50514 | 384 | 399 | CTGCAGTTGAGGTTCA | 17 | D | 238 |
| 806016 | 50547 | 50562 | 432 | 447 | CCTCGAAGATAAGCCA | 70 | D | 239 |
| 806020 | 52179 | 52194 | 504 | 519 | CCACATGTGATGTGTA | 31 | D | 240 |
| 806024 | 59525 | 59540 | 552 | 567 | ACCAAGTGGGCGGCTA | 17 | D | 241 |
| 806028 | 59580 | 59595 | 607 | 622 | TGCATTCAGTTCAAGG | 67 | D | 242 |
| 806032 | 68747 | 68762 | 674 | 689 | AGACACCCGTCAGACC | 11 | D | 243 |
| 806036 | N/A | N/A | 733 | 748 | AGAAACTCTTATTGCG | 8 | D | 244 |
| 806044 | 76237 | 76252 | 836 | 851 | CTACATTTGTCTGATA | 9 | D | 245 |
| 806048 | 76321 | 76336 | 920 | 935 | GAAAATGTTCTGAGAC | 15 | D | 246 |
| 806052 | 76380 | 76395 | 979 | 994 | CACAAGTGTTTTCTGG | 9 | D | 247 |
| 806056 | N/A | N/A | 1034 | 1049 | AAATCCAGGTCTGTGG | 35 | D | 248 |
| 806060 | 78362 | 78377 | 1091 | 1106 | TCCTGATGCATCGGTA | 11 | D | 249 |
| 806064 | 78413 | 78428 | 1142 | 1157 | TTACATCAGAGGGATG | 10 | D | 250 |
| 806068 | N/A | N/A | 1198 | 1213 | AATAATATACTGGCCA | 46 | D | 251 |
| 806076 | 115408 | 115423 | 1448 | 1463 | GCAAATCCCGGAATCG | 0+ | D | 252 |
| 806080 | 115462 | 115477 | 1502 | 1517 | TTCTAGAGTGAATGAA | 70+ | D | 253 |
| 806084 | 124716 | 124731 | 1548 | 1563 | TCAAATGGGCTTCCAA | 27 | D | 254 |
| 806088 | 124779 | 124794 | 1611 | 1626 | GCAAATGGAGTGACTC | 21 | D | 255 |
| 806092 | 126618 | 126633 | 1669 | 1684 | GTACAGTCTTCTTAAC | 39 | D | 256 |
| 806100 | 129057 | 129072 | 1782 | 1797 | AGCTGGATGTTCACAA | 17 | D | 257 |
| 806108 | 130926 | 130941 | 1892 | 1907 | TTTCATCAAATAAAAG | 77 | D | 258 |
| 806112 | 151471 | 151486 | 1949 | 1964 | TAGAACTGGGTCCACA | 22 | D | 259 |
| 806116 | 151527 | 151542 | 2005 | 2020 | AAATTTTGTCCCATAT | 52 | D | 260 |
| 806120 | 151575 | 151590 | 2053 | 2068 | CCCCAGTAGTCTCCTA | 9 | D | 261 |
| 806124 | 151626 | 151641 | 2104 | 2119 | ATTCAGCTGAGTTTCT | 73 | D | 262 |
| 806128 | 151688 | 151703 | 2166 | 2181 | CTCATTTTAAATAATC | 43 | D | 263 |
| 806132 | 151765 | 151780 | 2243 | 2258 | AATCACCACATCAGAT | 38 | D | 264 |
| 806136 | 151822 | 151837 | 2300 | 2315 | ATAAAAATCAACAGCG | 25 | D | 265 |
| 806140 | 151878 | 151893 | 2356 | 2371 | TATCAGCTTCAGTGTA | 22 | D | 266 |
| 806148 | 151990 | 152005 | 2468 | 2483 | AGCTACTCCACTTATG | 29 | D | 267 |
| 806152 | 152050 | 152065 | 2528 | 2543 | ACAAAGTTTTGTGCTA | 11 | D | 268 |
| 806156 | 152097 | 152112 | 2575 | 2590 | CAGGAGAGTCAGTAGT | 33 | D | 269 |
| 806160 | 152149 | 152164 | 2627 | 2642 | CCACATGGGTATAAGC | 12 | D | 270 |
| 806164 | 152193 | 152208 | 2671 | 2686 | TTCCTAGACGGAGGAT | 62 | D | 271 |
| 806168 | 152257 | 152272 | 2735 | 2750 | AAATCGGTGATCAAAC | 39 | D | 272 |
| 806172 | 152306 | 152321 | 2784 | 2799 | ATAAGCTTAAAGCACA | 19 | D | 273 |
| 806176 | 152366 | 152381 | 2844 | 2859 | GGAGAGAGGTCTTGTG | 24 | D | 274 |
| 806180 | 152424 | 152439 | 2902 | 2917 | AAGCAGGGTATCACTC | 21 | D | 275 |
| 806184 | 152473 | 152488 | 2951 | 2966 | AACTGAAATTTGAATA | 133 | D | 276 |
| 806188 | 152523 | 152538 | 3001 | 3016 | AGTAACTCACCGTGAT | 18 | D | 277 |
| 806192 | 152573 | 152588 | 3051 | 3066 | AAAAATAGGTGATAAA | 113 | D | 278 |
| 806196 | 152625 | 152640 | 3103 | 3118 | GAATATCTTCTTTCTT | 12 | D | 279 |
| 806200 | 152670 | 152685 | 3148 | 3163 | GATAGCATTAATAATT | 37 | D | 280 |
| 806204 | 152720 | 152735 | 3198 | 3213 | AGATTACCAAGCATAA | 18 | D | 281 |
| 806208 | 152768 | 152783 | 3246 | 3261 | TGAAATCCAAATAATA | 110 | D | 282 |
| 806212 | 152821 | 152836 | 3299 | 3314 | GGTTATTTGATGCTAA | 4 | D | 283 |
| 806216 | 152874 | 152889 | 3352 | 3367 | TAGGAAAGTGTTCCAA | 11 | D | 284 |
| 806220 | 152920 | 152935 | 3398 | 3413 | CCACAGTTCAGTCTAC | 6 | D | 285 |
| 806224 | 152967 | 152982 | 3445 | 3460 | CTCTTTGTAATCTAGA | 41 | D | 286 |
| 806228 | 153047 | 153062 | 3525 | 3540 | CATCAAGCCTGGACAA | 39 | D | 287 |
| 806232 | 153094 | 153109 | 3572 | 3587 | ACATAGGCATAAAAAT | 91 | D | 288 |
| 806236 | 153148 | 153163 | 3626 | 3641 | AAATATCATCTTGTTT | 54 | D | 289 |
| 806240 | 153192 | 153207 | 3670 | 3685 | TTAGATTAGGCAAGGA | 3 | D | 290 |
| 806244 | 153241 | 153256 | 3719 | 3734 | CAAAAATATACCATGT | 49 | D | 291 |
| 806248 | 153290 | 153305 | 3768 | 3783 | AATGAAGCTGTCTTCT | 35 | D | 292 |
| 806252 | 153340 | 153355 | 3818 | 3833 | GTGATTTAAGATTTAT | 32 | D | 293 |
| 806256 | 153366 | 153381 | 3844 | 3859 | TTTAATATTTATTACC | 102 | D | 294 |
| 806260 | 81835 | 81850 | 1294 | 1309 | CCATACTCTGCTGTGC | 9 | D | 295 |
| 806264 | 86382 | 86397 | 1346 | 1361 | TGGAAGTATCTTCATG | 20 | D | 296 |
| 806268 | 16840 | 16855 | N/A | N/A | AATGAATCATCTCTCT | 18 | D | 297 |
| 806272 | 30149 | 30164 | N/A | N/A | TGTCTCACAGACTCTA | 29 | D | 298 |
| | 91426 | 91441 | | | | | | |
| 806276 | 37417 | 37432 | N/A | N/A | AGGGATAATTTTCTAG | 40 | D | 299 |
| 806280 | 60193 | 60208 | N/A | N/A | GAGCATCTGATTCTGG | 37 | D | 300 |
| 806284 | 71093 | 71108 | N/A | N/A | AGCTATTGTGGAAGGT | 6 | D | 301 |
| | 97265 | 97280 | | | | | | |
| 806288 | 90247 | 90262 | N/A | N/A | AAAAGAGGGCCATAAC | 89 | D | 302 |
| 806292 | 95758 | 95773 | N/A | N/A | AAAATTCTTACTGGAA | 17 | D | 303 |
| | 96466 | 96481 | | | | | | |
| 806296 | 115933 | 115948 | N/A | N/A | GACATAACTATAGTGA | 20 | D | 304 |
| 806300 | 130196 | 130211 | N/A | N/A | TTATCTATATTATCTA | 87 | D | 305 |
| | 149100 | 149115 | | | | | | |
| 806304 | 151275 | 151290 | N/A | N/A | CAGGAAAAAATGTAAC | 79 | D | 306 |

[0319] “Start site” indicates the 5′-most nucleoside to which the modified oligonucleotide is complementary in the target nucleic acid sequence. “Stop site” indicates the 3′-most nucleoside to which the modified oligonucleotide is complementary in the target nucleic acid sequence. Each modified oligonucleotide listed in the table below is 100% complementary to SEQ ID NO: 3 (GENBANK Accession No. NM_015760.5).

TABLE 2
Reduction of NOX4 RNA by 3-10-3 cEt modified oligonucleotides with uniform phosphorothioate
internucleoside linkages at a concentration of 4000 nM in b.END cells

| | SEQ ID | SEQ ID | | | | |
|---|---|---|---|---|---|---|
| Compound | No: 3 | No: 3 | | NOX4 | | SEQ |
| Number | StartSite | Stop Site | Sequence (5′ to 3′) | (% UTC) | AID | ID NO |
| 806009 | 346 | 361 | CACAATCCTAGGCCCA | 67 | A | 307 |
| 806072 | 1259 | 1274 | ACACATTGTGAGAGTA | 24+ | D | 308 |

### Example 2: Dose-Dependent Reduction of Mouse NOX4 in b.END Cells by Modified Oligonucleotides

[0320] Modified oligonucleotides selected from the examples above were tested at various doses in b.END cells. Cultured b.END cells at a density of 20,000 cells per well were treated by electroporation with various concentrations of modified oligonucleotide as specified in the tables below. After a treatment period of approximately 24 hours, total RNA was isolated from the cells, and NOX4 RNA levels were measured by quantitative real-time RTPCR. Mouse NOX4 primer-probe set RTS35168 (described herein above) was used to measure RNA levels as described above. NOX4 RNA levels were normalized to total RNA content, as measured by RIBOGREEN®. Reduction of NOX4 RNA is presented in the tables below as percent NOX4 RNA, relative to the amount of NOX4 RNA in untreated control cells (% UTC).

[0321] The half maximal inhibitory concentration (IC₅₀) of each modified oligonucleotide was calculated using a linear regression on a log/linear plot of the data in Excel and is also presented in the tables below.

TABLE 3
Dose-dependent reduction of mouse NOX4 RNA
in b.END cells by modified oligonucleotides

| Compound | NOX4 RNA (% UTC) | | | | IC₅₀ |
|---|---|---|---|---|---|
| No. | 741 nM | 2222 nM | 6667 nM | 20000 nM | (μM) |
| 806013 | 39 | 24 | 7 | 3 | <0.7 |
| 806034 | 24 | 10 | 1 | 1 | <0.7 |
| 806070 | 33 | 12 | 5 | 1 | <0.7 |
| 806114 | 29 | 11 | 4 | 4 | <0.7 |
| 806130 | 18 | 5 | 3 | 2 | <0.7 |
| 806134 | 36 | 15 | 6 | 3 | <0.7 |
| 806154 | 16 | 6 | 3 | 3 | <0.7 |
| 806181 | 19 | 9 | 4 | 3 | <0.7 |
| 806194 | 28 | 10 | 6 | 1 | <0.7 |
| 806201 | 14 | 7 | 3 | 2 | <0.7 |
| 806202 | 21 | 8 | 4 | 2 | <0.7 |
| 806210 | 24 | 11 | 4 | 2 | <0.7 |
| 806221 | 19 | 9 | 4 | 2 | <0.7 |
| 806225 | 32 | 12 | 8 | 4 | <0.7 |
| 806240 | 21 | 7 | 3 | 1 | <0.7 |
| 806261 | 19 | 6 | 3 | 1 | <0.7 |
| 806277 | 18 | 5 | 4 | 3 | <0.7 |
| 806285 | 13 | 7 | 4 | 2 | <0.7 |

TABLE 4
Dose-dependent reduction of mouse NOX4 RNA
in b.END cells by modified oligonucleotides

| Compound | NOX4 RNA (% UTC) | | | | IC₅₀ |
|---|---|---|---|---|---|
| No. | 741 nM | 2222 nM | 6667 nM | 20000 nM | (μM) |
| 806036 | 22 | 14 | 5 | 3 | <0.7 |
| 806044 | 34 | 15 | 6 | 2 | <0.7 |
| 806052 | 41 | 15 | 4 | 1 | <0.7 |
| 806059 | 31 | 13 | 4 | 1 | <0.7 |
| 806063 | 29 | 15 | 2 | 2 | <0.7 |
| 806064 | 53 | 23 | 8 | 4 | <0.7 |
| 806110 | 62 | 40 | 30 | 17 | 1.44 |
| 806120 | 43 | 22 | 12 | 2 | <0.7 |
| 806131 | 36 | 17 | 9 | 2 | <0.7 |
| 806143 | 21 | 12 | 4 | 2 | <0.7 |
| 806163 | 32 | 15 | 5 | 3 | <0.7 |
| 806171 | 34 | 13 | 5 | 2 | <0.7 |
| 806179 | 26 | 10 | 5 | 3 | <0.7 |
| 806187 | 29 | 9 | 6 | 4 | <0.7 |
| 806212 | 14 | 6 | 2 | 1 | <0.7 |
| 806220 | 35 | 13 | 7 | 2 | <0.7 |
| 806240 | 25 | 5 | 2 | 1 | <0.7 |
| 806260 | 28 | 13 | 3 | 1 | <0.7 |
| 806267 | 24 | 6 | 2 | 1 | <0.7 |

### Example 3: Effect of a Modified Oligonucleotide Complementary to Mouse NOX4 in a Short-Term Cigarette Smoke Model of COPD

[0322] Two groups of eight, 10-week old male Balb/c mice (Taconic) were exposed to cigarette smoke (24 cigarettes per day) for a total of 4 continuous days (on Days 0, 1, 2 and 3). Another group of eight 10-week old male Balb/c mice (Taconic) were exposed to normal filtered air on Days 0, 1, 2, and 3.

[0323] One of the two groups of mice exposed to cigarette smoke received 3 loading doses Compound No. 806194 at 10 mg/kg on days −10, −7, and −3 by oropharyngeal aspiration. Following the loading doses, the mice were treated with Compound No. 806194 at 10 mg/kg on Days 0, and 2 by oropharyngeal aspiration.

[0324] The other group of mice exposed to cigarette smoke, and a group of mice that was not exposed to cigarette smoke (naïve) were treated with saline on days −10, −7, −3, 0, and 2 by oropharyngeal aspiration.

[0325] The mice were sacrificed on Day 4, forty-eight hours post the final administration of modified oligonucleotide. Treatment details are summarized in the table below. Lung function analysis, and BAL analysis was carried out on four of the eight mice from each group. RNA analysis was carried out on the remaining 4 animals from each group.

TABLE 5
Oropharyngeal aspiration treatment and smoking conditions
in short-term smoking COPD model study

| | Number | Compound dosed by | Smoking |
|---|---|---|---|
| Group | of mice | oropharyngeal aspiration | conditions |
| Naïve + | 8 | Saline [Days -10, -7, -3, | No smoke |
| Saline | | 0, and 2] | |
| Smoke + | 8 | Saline [Days -10, -7, -3, | Cigarette Smoke |
| Saline | | 0, and 2] | (24 cigarettes/day) |
| Smoke + | 8 | 806194 [Days -10, -7, -3, | Cigarette Smoke |
| 806194 | | 0, and 2 at 10 mg/kg/dose] | (24 cigarettes/day) |

### Lung Function Analysis

[0326] Lung function analysis was measured on Day 4 using the Penh score obtained through unrestrained plethysmography post methacholine challenge at 25 mg/ml using whole-body plethysmography (BuxcoElectronics, Sharon, CT). Airway hyperresponsiveness (AHR) was determined by inducing bronchoconstriction with methacholine aerosol at escalating doses (27). Total pulmonary airflow in unrestrained mice was estimated using a whole-body plethysmograph (Buxco Electronics, Sharon, CT). Pressure differences between a chamber containing an individual mouse and a reference chamber were used to extrapolate the enhanced pause (Penh). Penh is a dimensionless parameter that is a function of total pulmonary airflow in mice during each respiratory cycle. This parameter closely correlates with airway resistance as measured by traditional invasive techniques using ventilated mice. A higher Penh score indicates more lung constriction. The results, shown in the table below, indicate that pre-treatment with a modified oligonucleotide complementary to NOX4 prevented the increase in Penh score observed in the COPD mouse model.

TABLE 6
Lung Function (Penh) Scores

| Treatment | Penh Score |
|---|---|
| Naïve | 2 |
| Smoke | 3 |
| smoke + 806194 | 2 |

### Bronchoalveolar Lavage (BAL) Cellular Profile

[0327] Levels of macrophages (MAC), neutrophils (NEU), lymphocytes (LYM), and eosinophils (EOS) in the bronchoalveolar lavage fluid (BAL) were measured. Mouse lungs were lavaged two times with 0.5 ml of PBS containing 1% BSA (Sigma-Aldrich). BAL fluid samples were centrifuged to generate a cell pellet and a cell-free supernatant. The recovered airway cells were resuspended in PBS with 1% BSA, and a cytospin was performed. Cells were stained with Diff-Quik stain (VWR). Data are presented as the percent of cells present in the total recovered BAL cell population.

[0328] Extreme increases in neutrophils in BAL can be an indicator of acute and diffuse lung injury. Treatment with Compound No. 806194 resulted in a decrease in BAL neutrophil count.

TABLE 7
Cellular profile in BAL

| Treatment | MAC (%) | LYM (%) | EOS (%) | NEU (%) |
|---|---|---|---|---|
| Naïve | 97 | 2.3 | 0.0 | 1.0 |
| Smoke | 47 | 3.5 | 0.0 | 50.0 |
| Smoke + 806194 | 91 | 4.8 | 0.0 | 4.8 |

### RNA Analysis

[0329] On Day 4, RNA was extracted from the lungs of the mice for quantitative real-time RTPCR analysis of NOX4 RNA expression. The RTS35168 primer-probe set described above was used to measure levels of RNA of mouse NOX4.

[0330] RNA levels were normalized to mouse cyclophilin A levels. Mouse cyclophilin A was amplified using primer probe set m_cyclo24 (forward sequence TCGCCGCTTGCTGCA, designated herein as SEQ ID NO: 9; reverse sequence ATCGGCCGTGATGTCGA, designated herein as SEQ ID NO: 10; probe sequence CCATGGTCAACCCCACCGTGTTC, designated herein as SEQ ID NO: 11).

[0331] The levels ofNOX4 RNA expression are averaged for each group of mice and are presented as percent NOX4 RNA, relative to the amount in saline treated naïve animals, normalized to cyclophilin A (% control).

[0332] As presented in the table below, treatment with NOX4 modified oligonucleotide in the short-term smoking COPD model resulted in reduction of NOX4 RNA in comparison to the smoke+saline treated animals.

TABLE 8
Effect of modified oligonucleotides complementary
to mouse NOX4 on NOX4 RNA expression in a short-
term cigarette smoke-induced COPD model

| Treatment | % control NOX4 |
|---|---|
| Naïve + Saline | 100 |
| Smoke + Saline | 89 |
| Smoke + 806194 | 11 |

### Example 4: Effect of a Modified Oligonucleotide Complementary to Mouse NOX4 in the Sugen 5416/Hypoxia-Induced Mouse Model of Pulmonary Hypertension (PH)

[0333] Eleven-week-old male C₅₇BL/6J mice (Charles River Laboratories, Cambridge, MA) were given 3 loading doses of either saline or Compound No. 806194 at 10 mg/kg on days −10, −7, and −3 by oropharyngeal aspiration. Following the loading doses, the mice were treated with either saline or Compound No. 806194 on Days 0, 4, 7, 11, 14, 18, 21, and 25 (total 8 doses). In addition to treatment with saline or modified oligonucleotide, on Day 0, Day 7 and Day 14, the mice were injected subcutaneously with SU5416 (20 mg/kg) suspended with the aid of sonication in a mixture of 0.5% carboxymethylcellulose sodium (Sigma, St. Louis, MO), 0.9% sodium chloride (Sigma, St. Louis, MO), 0.4% polysorbate 80 (Sigma, St. Louis, MO), and 0.9% benzyl alcohol (Sigma, St. Louis, MO) in deionized water. On the same days (Day 0, Day 7 and Day 14), the mice were exposed to either room air (ambient oxygen levels) or chronic normobaric hypoxia inside a ventilated plexiglass chamber in which nitrogen was injected under the control of an Oxycycler controller (BioSpherix, Lacona, NY) to maintain hypoxia (10% oxygen). C₀₂ was monitored and ventilation was adjusted so that C₀₂ levels did not exceed 5,000 ppm (0.5%). Ammonia was removed by injection of pure air. After 3 weeks of exposure to 10% oxygen levels, and weekly injections of SU5416, animals were returned to normoxia for another week.

[0334] The mice were sacrificed on Day 28. Treatment details of each group of mice is specified in the table below.

TABLE 9
Disease establishment and treatment scheme in Sugen 5416/hypoxia-
induced mouse model of pulmonary hypertension

| | Number | Compound dosed by | |
|---|---|---|---|
| Group | of Mice | oropharyngeal aspiration | Oxygen Conditions |
| Saline | 8 | Saline (3 loading doses | Normal |
| | | followed by 8 doses on | |
| | | Days 0, 4, 7, 11, 14, | |
| | | 18, 21, and 25) | |
| Hypoxia + | 8 | Saline (3 loading doses | Hypoxic (Sugen |
| Saline | | followed by 8 doses on | 5416 + 10% oxygen |
| | | Days 0, 4, 7, 11, 14, | on (Day 0, Day 7 |
| | | 18, 21, and 25) | and Day 14) |
| Hypoxia + | 7 | 806194 (3 loading doses | Hypoxic (Sugen |
| 806194 | | at 10 mg/kg/dose followed | 5416 + 10% oxygen |
| | | by 8 doses on Days 0, 4, 7, | on (Day 0, Day 7 |
| | | 11, 14, 18, 21, and 25) | and Day 14) |

### RNA Analysis

[0335] On Day 28, RNA was extracted from the lungs of the mice for quantitative real-time RT-qPCR analysis of NOX4 RNA expression using primer-probe set RTS35168 (described herein above). RNA levels were normalized to mouse cyclophilin A levels, amplified using primer probe set m_cyclo24 (described herein above). The levels of NOX4 RNA expression are averaged for each group of mice and are presented as percent NOX4 RNA, relative to the amount in hypoxia+saline treated animals (% control).

[0336] As presented in the table below, treatment with NOX4 modified oligonucleotide in the Sugen 5416/hypoxia model of PH resulted in reduction of NOX4 RNA in comparison to the hypoxia+saline treated control.

TABLE 10
Effect of modified oligonucleotides complementary to mouse NOX4
on NOX4 RNA expression in a Sugen 5416/hypoxia-induced PH

| Treatment | % control NOX4 |
|---|---|
| Saline | 99 |
| Hypoxia + Saline | 100 |
| Hypoxia + 806194 | 15 |

### Heart Function

[0337] On Day 28, oxygen saturation was measured. Prior to euthanasia, oxygen saturation levels were measured using a MouseSTAT Pulse Oximeter (Kent Scientific).

[0338] On Day 28, right ventricle systolic pressure (RVSP), a PH phenotype, was measured in ventilated mice under 2.0%-2.5% isoflurane anesthesia delivered in room air with a flow of 2.0 L/min by inserting a 1.2 F mouse pressure catheter (Transonic Scisense Inc, ON, Canada) into the right ventricle via open chest method. Additionally, an indicator of RV (Right Ventricle) hypertrophy, the maximal rate of rise of right ventricular pressure (RV dP/dt_{MAX}) was measured during the RV catheterization as described herein above.

[0339] After euthanasia, the heart was isolated, and both atria were removed. The RV was carefully dissected from the LV (Left Ventricle) and the septum, and weighed (RV/LV+S).

[0340] As shown in the table below, treatment of the Sugen 5416/Hypoxia model with a modified oligonucleotide that targets NOX4 resulted in an improvement in RV/LV+S, oxygen saturation, RVSP, and RV dP/dt_{MAX}, compared to the saline-treated Sugen 5416/hypoxia control. Treatment resulted in a reduction of RV/LV+S, a reduction of RVSP, and a reduction of RV dP/dt_{MAX}, and an increase in oxygenation compared to the saline-treated Sugen 5416/hypoxia control.

TABLE 11
Effect of modified oligonucleotides complementary to mouse
NOX4 on heart function in a Sugen 5416/hypoxia-induced PH

| | | Oxygen | | |
|---|---|---|---|---|
| | RV/ | saturation | RVSP | dP/dt_{MAX} |
| Treatment | LV + S | (%) | (mmHg) | (mmHg/sec) |
| Saline | 0.28 | 97 | 22 | 1449 |
| Hypoxia + Saline | 0.43 | 85 | 32 | 2501 |
| Hypoxia + 806194 | 0.33 | 93 | 25 | 1623 |

### Example 5: Design of RNAi Agents Targeted to Mouse NOX4 Nucleic Acid

[0341] Double-stranded siRNA (siRNA) comprising antisense oligonucleotides complementary to mouse NOX4 nucleic acid, and sense oligonucleotides complementary to the antisense oligonucleotides are designed as follows.

[0342] The antisense oligonucleotide in each siRNA is 23 nucleosides in length; has a sugar motif (from 5′ to 3′) of: yfyfyfyfyfyfyfyfyfyfyyy; wherein each ‘y’ represents a ribo-2′-OMe sugar moiety, and each “f” represents a 2′-F sugar moiety; and an internucleoside linkage motif (from 5′ to 3′) of: ssooooooooooooooooooss; wherein ‘o’ represents a phosphodiester internucleoside linkage and ‘s’ represents a phosphorothioate internucleoside linkage. Each cytosine residue is a non-methylated cytosine. Each antisense oligonucleotide has a terminal phosphate at the 5′-end.

[0343] The sense oligonucleotide for each double-stranded siRNA is 21 nucleosides in length; has a sugar motif (from 5′ to 3′) of: fyfyfyfyfyfyfyfyfyfyf, wherein each ‘y’ represents a ribo-2′-OMe sugar moiety, and each “f” represents a 2′-F sugar moiety; and an internucleoside linkage motif (from 5′ to 3′) of: ssooooooooooooooooss; wherein ‘o’ represents a phosphodiester internucleoside linkage and ‘s’ represents a phosphorothioate internucleoside linkage. Each cytosine residue is a non-methylated cytosine.

[0344] Each antisense oligonucleotide is complementary to the target mouse NOX4 nucleic acid, which may be SEQ ID NO: 1 (GENBANK Accession No. NT_039433.8, truncated from nucleosides 4994000 to 5149000), or may be SEQ ID NO: 2 (GENBANK Accession No. NM_001285833.1), or may be both. Each antisense oligonucleotide may comprise at least 12, at least 13, at least 14, at least 15, or 16 contiguous nucleobases of the nucleobase sequence of any of SEQ ID NOs: 15-315.

[0345] Each sense oligonucleotide is complementary to the first of the 21 nucleosides of the antisense oligonucleotide (from 5′ to 3′) wherein the last two 3′-nucleosides of the antisense oligonucleotides are not paired with the sense oligonucleotide (are overhanging nucleosides).

[0346] Single-stranded RNAi (ssRNAi) RNAi agents comprising antisense oligonucleotides complementary to mouse NOX4 nucleic acid are designed as follows.

[0347] The antisense oligonucleotide in each siRNA is 23 nucleosides in length; has a sugar motif (from 5′ to 3′) of: yfyfyfyfyfyfyfyfyfyfyyy; wherein each ‘y’ represents a ribo-2′-OMe sugar moiety and each “f” represents a 2′-F sugar moiety; and an internucleoside linkage motif (from 5′ to 3′) of: ssooooooooooooooooooss; wherein ‘o’ represents a phosphodiester internucleoside linkage and ‘s’ represents a phosphorothioate internucleoside linkage. Each cytosine residue is a non-methylated cytosine. Each antisense oligonucleotide has a terminal phosphate at the 5′-end.

[0348] Each antisense oligonucleotide is complementary to the target mouse NOX4 nucleic acid, which may be SEQ ID NO: 1 (GENBANK Accession No. NT_039433.8, truncated from nucleosides 4994000 to 5149000), or may be SEQ ID NO: 2 (GENBANK Accession No. NM_001285833.1), or may be both. Each antisense oligonucleotide may comprise at least 12, at least 13, at least 14, at least 15, or 16 contiguous nucleobases of the nucleobase sequence of any of SEQ ID NOs: 12-308.

### Example 6: Effect of RNAi Agents Targeted to Mouse NOX4 Nucleic Acid on Mouse NOX4 RNA In Vitro, Single Dose

[0349] Cultured b.END cells are treated with RNAi agents designed according to Example 5 at a concentration of 0.1-20 nM by RNAiMAX at a density of 5,000 cells per well. After a treatment period of approximately 24 hours, total RNA is isolated from the cells and NOX4 RNA levels are measured by quantitative real-time RTPCR. NOX4 RNA levels are measured by mouse primer-probe set RTS35168 (described herein above). NOX4 RNA levels are normalized to total RNA content, as measured by RIBOGREEN®. Reduction of NOX4 RNA is assessed as percent NOX4 RNA relative to the amount of NOX4 RNA in untreated control cells (% UTC).

### Example 7: Effect of an RNAi Agent that Targets Mouse NOX4 in a Short-Term Cigarette-Smoke Model of COPD

[0350] Balb/c mice are either exposed to cigarette-smoke (24 cigarettes per day) for a total of 4 continuous days, or exposed similarly to normal filtered air. One group of mice exposed to smoke and one group of mice exposed to normal filtered air is treated with saline either by oropharyngeal aspiration or by aerosol administration. One group of mice exposed to smoke is treated with the RNAi agent either by oropharyngeal aspiration (at 10 mg/kg) or by aerosol administration (at 1 mg/kg).

### Lung Function Analysis

[0351] Lung function analysis is measured using the Penh score obtained through unrestrained plethysmography post methacholine challenge at 25 mg/ml using whole-body plethysmography (BuxcoElectronics, Sharon, CT). Airway hyperresponsiveness (AHR) is determined by inducing bronchoconstriction with methacholine aerosol at escalating doses (27). Total pulmonary airflow in unrestrained mice is estimated using a whole-body plethysmograph (Buxco Electronics, Sharon, CT). Pressure differences between a chamber containing an individual mouse and a reference chamber are used to extrapolate the enhanced pause (Penh). Penh is a dimensionless parameter that is a function of total pulmonary airflow in mice during each respiratory cycle. This parameter closely correlates with airway resistance as measured by traditional invasive techniques using ventilated mice. A higher Penh score indicates more lung constriction.

[0352] Treatment with an RNAi agent results in a decrease in the Penh score compared to saline treated animals in the short-term cigarette-smoke model of COPD.

### Bronchoalveolar Lavage (BAL) Cellular Profile

[0353] Levels of macrophages, neutrophils, lymphocytes, and eosinophils in the bronchoalveolar lavage fluid (BAL) are measured. Mouse lungs are lavaged two times with 0.5 ml of PBS containing 1% BSA (Sigma-Aldrich). BAL fluid samples are centrifuged to generate a cell pellet and a cell-free supernatant. The recovered airway cells are resuspended in PBS with 1% BSA, and a cytospin is performed. Cells are stained with Diff-Quik stain (VWR). Data are presented as the percent of cells present in the total recovered BAL cell population.

[0354] Extreme increases in neutrophils in BAL can be an indicator of acute and diffuse lung injury. Treatment with an RNAi agent results in a decrease in BAL neutrophil count in the short-term cigarette-smoke model of COPD.

### RNA Analysis

[0355] RNA is extracted from the lungs of the mice for quantitative real-time RT-PCR analysis of NOX4 RNA expression. The RTS35168 primer-probe set described above is used to measure levels of RNA of mouse NOX4. RNA levels are normalized to mouse cyclophilin A levels, amplified using primer probe set m_cyclo24 (described herein above). The levels of NOX4 RNA expression are averaged for each group of mice and are assessed as percent NOX4 RNA, relative to the amount in saline treated naïve animals, normalized to cyclophilin A (% control).

[0356] Treatment with an RNAi agent that targets NOX4 in the short-term smoking COPD model results in reduction of NOX4 RNA in comparison to the smoke+saline treated animals.

### Example 8: Effect of RNAi Agents that Target Mouse NOX4 in the Sugen 5416/Hypoxia-Induced Mouse Model of Pulmonary Hypertension (PH)

[0357] Hypoxic conditions are induced by subcutaneous injection with SU5416 (20 mg/kg) suspended with the aid of sonication in a mixture of 0.5% carboxymethylcellulose sodium (Sigma, St. Louis, MO), 0.9% sodium chloride (Sigma, St. Louis, MO), 0.4% polysorbate 80 (Sigma, St. Louis, MO), and 0.9% benzyl alcohol (Sigma, St. Louis, MO) in deionized water. On the same day as the SU5416 treatment, the mice are exposed to either room air (ambient oxygen levels) or chronic normobaric hypoxia inside a ventilated plexiglass chamber in which nitrogen is injected under the control of an Oxycycler controller (BioSpherix, Lacona, NY) to maintain hypoxia (10% oxygen). CO₂ is monitored and ventilation is adjusted so that CO₂ levels will not exceed 5,000 ppm (0.5%). Ammonia is removed by injection of pure air. After 3 weeks of exposure to 10% oxygen levels, and weekly injections of SU5416, animals are returned to normoxia for another week before they are sacrificed

[0358] One group of mice exposed to hypoxic conditions and one group of mice exposed to normal air are treated with saline either by oropharyngeal aspiration or by aerosol administration. One group of mice subjected to hypoxic conditions is treated with the RNAi agent either by oropharyngeal aspiration (at 10 mg/kg) or by aerosol administration (at 1 mg/kg).

### RNA Analysis

[0359] RNA is extracted from the lungs of the mice for quantitative real-time RT-qPCR analysis of NOX4 RNA expression. The RTS35168 primer-probe set described above is used to measure levels of RNA of mouse NOX4. RNA levels are normalized to mouse cyclophilin A levels, amplified using primer probe set m_cyclo24 (described herein above). The levels of NOX4 RNA expression are averaged for each group of mice and are assessed as percent NOX4 RNA, relative to the amount in hypoxia+saline treated animals (% control).

[0360] Treatment with RNAi agents targeted to NOX4 in the Sugen 5416/hypoxia model of PH results in reduction of NOX4 RNA in comparison to the hypoxia+saline treated control.

### Heart Function

[0361] Prior to euthanasia, oxygen saturation levels are measured using a MouseSTAT Pulse Oximeter (Kent Scientific). Oxygen saturation improves in the Sugen 5416/hypoxia model of PH after treatment with an RNAi agent that targets mouse NOX4 relative to the Sugen 5416/hypoxia control animals.

[0362] Right ventricle systolic pressure (RVSP), a PH phenotype, is measured in ventilated mice under 2.0%-2.5% isoflurane anesthesia delivered in room air with a flow of 2.0 L/min by inserting a 1.2 F mouse pressure catheter (Transonic Scisense Inc, ON, Canada) into the right ventricle via open chest method. RVSP increases in the Sugen 5416/hypoxia model of PH compared to naïve animals. RVSP is found to be reduced in the Sugen 5416/hypoxia model of PH after treatment with an RNAi agent that targets mouse NOX4 relative to the Sugen 5416/hypoxia control animals.

[0363] Additionally, an indicator of RV (Right Ventricle) hypertrophy, RV dP/dt_{MAX} is measured during RV catheterization as described herein above. RV hypertrophy is an abnormal enlargement or pathologic increase in muscle mass of the right ventricle in response to pressure overload. RV hypertrophy is found to be reduced in the Sugen 5416/hypoxia model of PH after treatment with an RNAi agent that targets mouse NOX4 relative to the Sugen 5416/hypoxia control animals.

[0364] The extent of right ventricular hypertrophy is estimated by calculation of the ratio of RV/LV+S. A higher RV/LV-S ratio is associated with increased levels of right ventricular hypertrophy. After euthanasia, the heart is isolated, and both atria are removed. The RV is carefully dissected from the LV (Left Ventricle) and the septum (S), and weighed to determine the (RV/LV+S) ratio. The RV/LV+S ratio is found to be reduced in the Sugen 5416/hypoxia model of PH after treatment with an RNAi agent that targets mouse NOX4 relative to the Sugen 5416/hypoxia control animals.

### Example 9: Effect of Modified Oligonucleotides or RNAi Agents that Target Rat NOX4 in a Rat Sugen 5416/Hypoxia Model of Pulmonary Hypertension (PH)

[0365] Sprague-Dawley rats are dosed subcutaneously with 30 mg/kg Sugen 5416 and exposed to 21 days of hypobaric hypoxia. Rats are then maintained in normoxia for 21 days. A separate group of rats are exposed to normal air.

[0366] One group of rats exposed to hypoxic conditions and one group of rats exposed to normal air are treated with saline either by oropharyngeal aspiration or by aerosol administration. One group of rats subjected to hypoxic conditions is treated with the modified oligonucleotide or the RNAi agent either by oropharyngeal aspiration (at ˜1-3 mg/kg) or by aerosol administration (at ˜0.3-1 mg/kg).

[0367] Treatment with modified oligonucleotides or RNAi agents targeted to NOX4 in the rat Sugen 5416/hypoxia model of PH results in reduction of NOX4 RNA in comparison to the hypoxia+saline treated control.

### Heart Function

[0368] Prior to euthanasia, oxygen saturation levels are measured using a pulse oximeter. Oxygen saturation improves in the Sugen 5416/hypoxia model of PH after treatment with a modified oligonucleotide or an RNAi agent that targets rat NOX4 relative to the Sugen 5416/hypoxia control animals.

[0369] Right ventricle systolic pressure (RVSP), a PH phenotype, is measured in ventilated rats under 2.0%-2.5% isoflurane anesthesia delivered in room air by inserting a catheter into the right ventricle via open chest method. RVSP increases in the Sugen 5416/hypoxia model of PH compared to naïve animals. RVSP is found to be reduced in the Sugen 5416/hypoxia model of PH after treatment with a modified oligonucleotide or an RNAi agent that targets rat NOX4 relative to the Sugen 5416/hypoxia control animals.

[0370] Additionally, an indicator of RV (Right Ventricle) hypertrophy, RV dP/dtAx is measured during RV catheterization as described herein above. RV hypertrophy is an abnormal enlargenent or pathologic increase in muscle mass of the right ventricle in response to pressure overload. RV hypertrophy is found to be reduced in the Sugen 5416/hypoxia model of PH after treatment with a modified oligonucleotide or an RNAi agent that targets rat NOX4 relative to the Sugen 5416/hypoxia control animals.

[0371] The extent of right ventricular hypertrophy is estimated by calculation of the ratio of RV/LV-+S. A higher RV/LV+S ratio is associated with increased levels of right ventricular hypertrophy. After euthanasia, the heart is isolated, and both atria are removed. The RV is carefully dissected from the LV (Left Ventricle) and the septum (S), and weighed to determine the (RV/LV+S) ratio. The RV/LV+S ratio is found to be reduced in the Sugen 5416/hypoxia model of PH after treatment with a modified oligonucleotide or an RNAi agent that targets rat NOX4 relative to the Sugen 5416/hypoxia control animals.

What is claimed is:

1. A method of treating a pulmonary disease or disorder in a subject having, or at risk of having, a pulmonary disease or disorder comprising administering a NOX4-specific inhibitor to the subject, thereby treating the pulmonary disease or disorder in the subject.

2. The method of claim 1, wherein the pulmonary disease or disorder is chronic obstructive pulmonary disease (COPD) or pulmonary hypertension (PH).

3. The method of claim 1 or claim 2, wherein the administration of the NOX4-specific inhibitor ameliorates at least one symptom of the pulmonary disease or disorder.

4. The method of claim 3, wherein the symptom is coughing, wheezing, difficulty breathing, shortness of breath, chest pressure, chest pain, edema in one or both ankles, edema in one or both legs, edema in one or both feet, vascular remodeling, low blood oxygen, increased blood pressure, fatigue, dizziness, frequent respiratory infections, or coughing with mucus.

5. The method of any of claims 1-4, wherein administration of the NOX4-specific inhibitor reduces coughing, reduces wheezing, improves breathing, reduces shortness of breath, reduces chest pressure, reduces chest pain, reduces edema in one or both ankles, reduces edema in one or both legs, reduces edema in one or both feet, reduces or reverses vascular remodeling, increases blood oxygen, decreases blood pressure, reduces fatigue, reduces dizziness, reduces the frequency of respiratory infections, reduces coughing with mucus, or a combination thereof.

6. The method of any of claims 1-5, wherein administering the NOX4-specific inhibitor improves spirometry, lung function, oxygen saturation, or blood pressure, or a combination thereof.

7. The method of any of claims 1-6, wherein administering the NOX4-specific inhibitor reduces bronchial tube inflammation, increases spirometry levels of forced vital capacity, increases spirometry levels of forced expiratory volume, improves lung function, increases oxygen saturation, or decreases blood pressure, or a combination thereof.

8. The method of any of claims 1-7, wherein the subject is a human subject.

9. A method of inhibiting expression or activity of NOX4 in a cell comprising contacting the cell with a NOX4-specific inhibitor, thereby inhibiting expression or activity of NOX4 in the cell.

10. The method of claim 9, wherein the cell is a human cell.

11. The method of claim 9 or claim 10, wherein the cell is a lung cell.

12. The method of any of claims 9-11, wherein the cell is in a subject.

13. The method of claim 12, wherein the subject is human.

14. The method of claim 12 or claim 13, wherein the subject has, or is at risk of having a pulmonary disease or disorder.

15. The method of claim 14, wherein the pulmonary disease or disorder is COPD, or PH.

16. Use of a NOX4-specific inhibitor for the manufacture or preparation of a medicament for treating a pulmonary disease or disorder.

17. Use of a NOX4-specific inhibitor for the treatment of a pulmonary disease or disorder.

18. The use of claim 16 or claim 17, wherein the pulmonary disease or disorder is COPD or PH.

19. The use of any of claims 16-18, wherein the NOX4-specific inhibitor ameliorates at least one symptom of the pulmonary disease or disorder.

20. The use of claim 19, wherein the symptom is coughing, wheezing, difficulty breathing, shortness of breath, chest pressure, chest pain, edema in one or both ankles, edema in one or both legs, edema in one or both feet, vascular remodeling, low blood oxygen, increased blood pressure, fatigue, dizziness, frequent respiratory infections, or coughing with mucus

21. The use of claim 19 or claim 20, wherein the NOX4-specific inhibitor reduces coughing, reduces wheezing, improves breathing, reduces shortness of breath, reduces chest pressure, reduces chest pain, reduces edema in one or both ankles, reduces edema in one or both legs, reduces edema in one or both feet, reduces or reverses vascular remodeling, increases blood oxygen, decreases blood pressure, reduces fatigue, reduces dizziness, reduces the frequency of respiratory infections, reduces coughing with mucus, or a combination thereof.

22. The use of any of claims 16-21, wherein the NOX4-specific inhibitor improves spirometry, lung function, oxygen saturation, or blood pressure, or a combination thereof.

23. The use of any of claims 16-22, wherein the NOX4-specific inhibitor reduces bronchial tube inflammation, increases spirometry levels of forced vital capacity, increases spirometry levels of forced expiratory volume, improves lung function, increases oxygen saturation, or decreases blood pressure, or a combination thereof.

24. The method or use of any of claims 1-23, wherein the NOX4-specific inhibitor is an antisense agent, a polypeptide, an antibody, or a small molecule.

25. The method or use of any of claims 1-24, wherein the NOX4-specific inhibitor is an antisense agent comprising a modified oligonucleotide, wherein the modified oligonucleotide has a nucleobase sequence complementary to any one of SEQ ID NOs: 1-5.

26. The method or use of claim 25, wherein the nucleobase sequence of the modified oligonucleotide is complementary to SEQ ID NO: 3 or SEQ ID NO: 4.

27. The method or use of claim 26, wherein the nucleobase sequence of the modified oligonucleotide is at least 90% complementary to the nucleobase sequence of an equal length portion of SEQ ID NO: 3 or SEQ ID NO: 4.

28. The method or use of claim 26, wherein the nucleobase sequence of the modified oligonucleotide is at least 95% complementary to the nucleobase sequence of an equal length portion of SEQ ID NO: 3 or SEQ ID NO: 4.

29. The method or use of claim 28, wherein the nucleobase sequence of the modified oligonucleotide is 100% complementary to the nucleobase sequence of an equal length portion of SEQ ID NO: 3 or SEQ ID NO: 4.

30. The method or use of any of claims 24-29, wherein the antisense agent is single-stranded.

31. The method or use of any of claims 24-29, wherein the antisense agent is double-stranded.

32. The method or use of any of claims 25-29, wherein the modified oligonucleotide consists of 12 to 30 linked nucleosides.

33. The method or use of any of claims 25-32, wherein at least nucleoside of the modified oligonucleotide comprises a modified nucleobase.

34. The method or use of claim 33, wherein the modified nucleobase is a 5-methylcytosine.

35. The method or use of any of claims 25-34, wherein at least one nucleoside of the modified oligonucleotide comprises a modified sugar moiety.

36. The method or use of claim 35, wherein the modified sugar moiety is a bicyclic sugar moiety.

37. The method or use of claim 36, wherein the modified sugar comprises a 4′-CH(CH₃)—O—2′ bridge or a 4′-(CH₂)ₙ—O—2′ bridge, wherein n is 1 or 2.

38. The method or use of claim 37, wherein the modified sugar moiety comprises a non-bicyclic modified sugar moiety.

39. The method or use of claim 38, wherein the non-bicyclic sugar moiety is a 2′-F, 2′-OMe, or 2′-MOE sugar moiety.

40. The method or use of any of claims 25-39, wherein the modified oligonucleotide has:
a gap segment consisting of linked 2′-deoxynucleosides;
a 5′ wing segment consisting of linked nucleosides;
a 3′ wing segment consisting linked nucleosides;
wherein the gap segment is positioned immediately adjacent to and between the 5′ wing segment and the 3′ wing segment and wherein each nucleoside of each wing segment comprises a modified sugar moiety.

41. The method or use of any of claims 25-39, wherein the modified oligonucleotide has a sugar motif comprising:
a 5′-region consisting of 1-6 linked 5′-region nucleosides;
a central region consisting of 6-10 linked central region nucleosides; and
a 3′-region consisting of 1-6 linked 3′-region nucleosides;
wherein the 3′-most nucleoside of the 5′-region and the 5′-most nucleoside of the 3′-region comprise modified sugar moieties, and
each of the central region nucleosides is selected from a nucleoside comprising a 2′-β-D-deoxyribosyl sugar moiety and a nucleoside comprising a 2′-substituted sugar moiety, wherein the central region comprises at least six nucleosides comprising a 2′-β-D-deoxyribosyl sugar moiety and no more than two nucleosides comprise a 2′-substituted sugar moiety.

42. The method or use of claim 41, wherein the central region consists of 6-10 nucleosides comprising a 2′-β-D-deoxyribosyl sugar moiety.

43. The method or use of any one of claims 25-42, wherein at least one internucleoside linkage of the modified oligonucleotide is a modified internucleoside linkage.

44. The method or use of claim 43, wherein the at least one modified internucleoside linkage is a phosphorothioate internucleoside linkage.

45. The method or use of claim 44, wherein each internucleoside linkage is a phosphorothioate internucleoside linkage.

46. The method or use of claim 44, wherein each internucleoside linkage is independently selected from a phosphodiester internucleoside linkage and a phosphorothioate internucleoside linkage.

47. The method or use of any of claims 25-46, wherein the antisense agent comprises a conjugate group.

48. The method or use of any of claims 1-47, wherein the NOX4-specific inhibitor is an RNase H agent capable of reducing the amount of NOX4 nucleic acid through the activation of RNase H.

49. The method or use of any of claims 1-47, wherein the NOX4-specific inhibitor is an RNAi agent capable of reducing the amount of NOX4 nucleic acid through the activation of RISC/Ago2.

50. The method or use of any of claims 1-47, wherein the NOX4-specific inhibitor is a steric-blocking agent capable of directly binding to a target nucleic acid, thereby blocking the interaction of the NOX4 nucleic acid with other nucleic acids or proteins.

51. The method of any of claims 1-8 or 16-50, wherein a therapeutic amount of the NOX4-specific inhibitor is administered to the subject.

52. The method of any of claims 1-8 or 16-51, wherein the NOX4-specific inhibitor is administered by aerosolized delivery.

53. The method of any of claims 1-8 or 16-51, wherein the NOX4-specific inhibitor is administered via a nebulizer or inhaler.

The application's sequence listing, which the Patent Office published only in electronic form, follows.

SEQUENCE LISTING (308 sequences)

SEQ ID NO: 1 - DNA, 155001 bp, Mus musculus
tggatagtctcctttctttagtggtgacacacctggggggttttcatatgtcacttctttggttctttaggtataaagaagtatacttaggtgtgaataagttatattaactggcaatgaagtcttagtattacttacacattatatggtagacaactctgagaagtattcttgactcactcatgcttgagacaggttacacattgaaatgagaggacacaaagaaatgtgtgtggtggtcaactaggactcgatacagattgattccagtttttcaatctgaaggttggaattgaatgcagtttcttaaattaacttagataaggacgttgcatgaagtacagcatgatttattaaattttagttccattaattaaacttttacttcaattgccagtgtgataaaatgttttttcattttacaagaaaaatcttggatgacatgaaattagattaagcacatcaaatgccttttctttctttctttctttctttctttctttctttttcttcttttttttttttttacctattacgtatgttagttaataaagtcactgaacaccgattatgatacagacattatttcatatgattaactgtttaactaattaactatgcccattgcacactcctcaccttccatagacttctggtacaagtttaagagggtttctttttaatgagttgactttgcaattagcagtataaagtgcacattcctagagggaatctgagcttcctaaaaactcctgaaaataacgtcagcgttaactctttgcctgcctggtttgttttcagcaagatacagaaagttttatctcaagacagggataggtggggcagctgatagagaagtgggaagaaaggaagacttgggcttctgactgtgagatggtacttctttgtagacacaggactggctggatagggaaggctaatacacaaaaggctacttccggctcaaatttctttaccaagtttctttcagccgaacttttcttttttttgttctttttttcttttctttctgtcattttggcggcgtggtggtgggtgggtgggtgggtgggtggtgctggtggcggtggtggtgcacaaccattctaggaagtagggtgtatgcgccccgggatgcaaagaacgtccccaagcttccgattcccattctcgcatctggggcatgtctgcagctggacaggcccggctggaggctgcaggggacgcctccaccttcccacccgggacgtcctgaaccgccgccacaacaacaggctcgcgcgagacaaaggggctggcgcagggcggcgcgcggggccagggggcgtggggaggcaagggagcagcgcggtgggagccgggtggagacctccagccaggcctccagactcagtacagcctttgaccctcgcccccacgccgctcccctgcaggcggcgcccctggatctgctgccccggccactgatcgctcctttcggtcctgagcaccgagcagggcgcagcactccccgcgccggcggcatggcggtgtcctggaggagctggctggccaacgaaggggttaaacacctctgcctggtaggatggagggccaagctggcctgacagacagtctatctatgctgcagccagtttgattcattctcagaatgtgtactggtgggatgagagaattggaagtttgggggtttagttttctgactttctcacctaaccatgactttatgcattcctggaaatacttcctgctcaatgcaagggagctttagtacagattgatgaggagccaatgcagaggaaaggggagctaagggagcttttaaaacactcatttcctatgctcttccaattgcttccctatattgggcatcccatgcgccatgataatgatactactttcttactctcagtttgcaatagagttggggaagtaaggtgtagctgattaagtgatctattagccaccaacctttatttcagtgcagggtctgggtaaggccaagtgaggtgtcctcagagcagcttttccacttactgactgagcatgctttctgctttctgaaattgcatgtacccaggtgagtcttgtgtgtggcttctatcagatgattatttttcttttttttttaactttgtttttttctttctctttgactggtctagctcatttggctgtccctaaacgttctacttttctggaaaaccttcctgctgtacaaccaagggccagaatactactacattcaccaaatgttgggcgtaagtgaatctgggatgacctggtagagtgggtttaaggcaacaaactactacaggattttgtcagtacacccatttctcatagtaatatttgctgtcaacttaaaaaacatgtgtttctttgagcagtcaagcttcttgagtttggccctttaaggagcaagggtagtagtatctgttaaattgaggtaaatgaacctgtcagaccaggctatcagagtctgagggaagttgctggcttctgcttcttcttcttcttcttcttcttcttcttcttcttcttcttcttcttcttcttcttcttcttcttcttcttcttcttcttcttcttcttcttcttcttcttctcctttttttcccccccaagctgcaccagtgagcaagccctgaagagtttgcttctctcagaggaccagctgatgacagactgttagtctagacttatcaaggctctctgccttcccacaagtctgtccagaggatgtcagcactggttttcttttactgacagttctcacaaagtgagctgttatttatttctaagtagccttggctggttgccataggttattggccgggtctggttctggtctgaggacagaatcaaacaaactctgtcctggtttatttcatgttgatatttctctttgttctgtttctcatctcatcttctaattctatctctaccttactagatcctataaatggcagggtcctccaggatatcttactttgtaccaggagactgaattctcctaagcaaccacacaaagtataaaaggtgttatacaattgtagatttatcatcactggagaggaaaacatattctaaagaggacacttattgcttttttttcataaaattgtaactatttaaaatcacttcagttgaattcagtgcaactagcttcactttcatgattggaggacataggtttatcttttaatcttagttctctgtgtagtgattaggacatatcaagtctgcagtaagttgcagctgaattaattgatatttttgaaacagattactgtattaaagctcttgattgtgacatcttcttaacatttaacaccactagctttaactattggggtcagaaacattgtttcagaaaagaaaaaagagaccccctcccttattgaagattctgaaattaatatgcttgtcctttctcatctatctaaatttggtctatttatctagaactgttctttacattgctttctaaatagtcccagagaataaagtatttactatttttcaagtgccttacactctgatgcaaaacagcaaccaaaacccacaagcaaacaaaccaatcaaataattgtaggttaataaacacattaagaagaatttctctgatgagttaccaaggacgcctagcttttcattctctttcttgaaaactcactactcaaagtgaattaataagtgagaagtttttaaatatgaggtttattttacttaatgcataacacactcggtgaacaacttgtaagaaatcacgtgagaattaccctggcagagtttgttctggatcagggtgcttatgttactatccaaatctaagaattataaaagccataactcaactttggagttttactcttaaaataatagaaacgtttcctttctaaagggagctaagctaattttgcttgactccaacagggtgggtttcatgtacttggatgctgtgtaatttgttgttgacaaatcagctaagattaagctcgtgtgtacttgcccgtacatacaggaacagatatagtcaaacccattttaaagacacttcaaaatatgctccatgtttctactgttattctacgttagtgcttttgctcaagtgatgttatagaacagagatgtctaagaactgtgcattcatgacagggattggccacgtgaatgaaaagctcagatgggtgatgaggaaaaagaagtgcagcaagcagactgatgaaactcatgactagtgacagcaggtggaccaacattttcaccagactccttgtaaaaaggagtgacctttcttgtcacgcgttgctttctgaatattgcttgttatgagttctgtagtattaatttacctaagctattttcaatagatatttcaacttacatattggtgtttaatgaacgaggccttccatccatacctttactattgactttgtaagggaggatttaatgtgtttctgttgatagtcatcctcggcttacctttctagtcttataatgattgtggtatggtttcacaaggaatgaatttacactttgttgcatgacaaatacagcacaatgatgagatataactaattctaaaatatacatttgggtctccacattttataccttttgcatatcacttgtttaataactttaaagctgtacaggtgaaagagttccaccatgacagtactgtagaaatgatgagggatacccaggtattgtgatgttttaagtcactttctggtaatctttagattaaaaaaatggtggtagtcctagaaatcaatttactttactataaaacacaaatggaaggtggaagttgaaacttgccccatcacaagcatcaagtcgaaagtggggaatggccacaagctcctataacctcattgctgtggcagagacagcaggaccactggggcttgttggtgttagcctagctctaggtcagtgagagaccctgtctcatgggagtgagagtaatagagccagacactcggtgtcttctggtatctacatcaatgcatgagctcatgtacccaaacacaatggtgtgtatataccacactcactcaggcatatatgcatacacacctataacaaaaaggggaaaaaggcacgaaaggaaatagtaaatttgttctgcaaacattttgataatgccattaagtgctctgattgctgtcatttatgtatgaaatataacccagttgtctagtttcataagctgaaaggaaccactgaatatgtcttattcacagaaagatgtagctctctggaggcattacttattagtcattgtttgaaatccctacttttatattgaagccaattatctatgaaagttcatttattctgatagtatgtcaggcacttgagaaatgtttgtttcagctaggaagctattctatttgccttatggaggaggaaatatagagtagtaacgcggtggggcttgctcaaatgtctttggtggtggcagggtcaatgttacagtgttttctggcctctcagctcttccctcattacctatttttctaaaactctatactggctaatcttaggtacatatccaattggttaatatcctcctcatcagtgttcctcaataaaaatatgatacaagacaaagtaaaaaaagctgcaggaattaattaaaaaatacctttaaccaaacaaatgcaaagtgccattctttggatatgtagccatgattaaaaataccaaagtgatatttgacagtttatcatacaaactatttgtaatacagtatgctacactcatttacattataatattctgttcactcagtaaaatgttattagaaatagtaaactagtatttagattttacaaagcttacagctatgaagctgattcatatacctaaatgctctacacatacatgaagattgtctaattacacaaatgagtatcagcttttaaatttaaatttaggagtcaggtgacatctgtctggatttcttatggtctcagctacttaagaaactgtatcaggtggattgcctaaactctagcagcatgatagtagggccctgcttcaacaacaacaacaaaaacaacaacaacaacaaaaattaattaattaataagcataaaaaacaaaacttcaatctcttggtgatcctaggcacagtttatccttcaggttaccaggtatactaagtgaattgtttggggtatttcaagtaaatgccatggtggtagaatattcttgccttgatatacaggtaaccttaccattctgctttaaaaaaaaaacagctggtcaaccaattagctcagttatatatgcctggggaccaatgaaatggttcatcaggaaaggaggtaaaggtacatgctaccacacccttaaatctacacacacacacagaaagagagagagagagagagagagagagagagagagagagagagagagagagagaagagggtaaagaaaaagaaagaaaaacatatctaaattttggtggctttctagttccttttctctggacattgaatgcaagatgtgggatgtaattatttaactggaccataaagcaaacaaacaaacaaacaaacaaaccaatcagaaaatcaaacaaaaacaaatcagaacaagaaacatcagagttctgcgtcagtatctgaacttgttgatgggggctcattagaattttgggaacactaattttcaacactagagggtttgtttttattgccagatggtttttcttagaagaaatttaaaggttgataaacttttgacaacagagaaaattagatctgaagcattggaagatttaggaagaggtgagattaatttgttttgatagcattcttatgattattagtcactgcatgggtctgatacagacagaggcatcatggtcacggctggtttatgctcaagttaatgtgctaatcagatcttgcgctcctcaggagatgtttaattgtgacacgaggtgcagtttggaatcttaacatgggtggagagaaaacaaagtgtaagcgaaaaccaagataaacatccaaacaagctaataagtaaaatccccattatccacctcccactggaactcttaaaataaaggattctatggactatttaagatgaaacctgtttccatttattttaaggaaggtgaagtgtggttactcatttttccacattaatgattaccaatgtctgtgagccactctgagaaaattagttttctatttttttatggatattaagtcattgtttgcagtgttagatttcccgaacacaacacaatttctctccaatacctctctctctctctgctgtctgtctgtctgtctgtctatctatctatctatctatctatctatctatctatctatctatcgatctcttaaaggtcaaaacatgctagacacgtatctccatggtatggtccttgtctaatacacaagatgctctttccatctcctgtaaaacatgctatttaattggtataaatatttgagtgtgggccaagcatatatctgttagtaatagatcaagttgtcatgactttctactttcttttctctacaaagtaatttttatataaagtgtttattttttctgtaattgttcccttggtgccaagatggcaacttacgtttttatccttttctcccataaatatatatattttaaatgtcctgcagtgatgatgtttttctattcctttggaaagtcttaactaagattttcattttgtttgaaaaaagctgtgagtgctctgactctttttaagtttgtagagttatataagcatggcatttctaaagaccaccttctgattcctagggctataacatagcgttttcggaagcagctatcagccttctccccatggtgtctgaggtatccagatgaatagccctgggatttcaagtcatttttagttcacagctttgattctgctgaggaagaatatacattctttgaatttcaaagaaggcttaataattaacttttcctttttattgcacaaaatataaaagtcagtgtctagacttagccacgcatggattgagctttcaattcagagatattttcaggcaagtgtttttgttgatgttgaaatgtgaaatccaggttattgacaattgagtttatataatgtagttctatattatattacattaaaaccaatcacatattctgtatctgcttatgctagataggaaggcatacatttttagggttgggaattttgattttgttgttgttgttgttgttgttgtttgttgttgttgttgttgtgagactcgatggcttcagacagagtcactgtgtagcacagacaggctgactggctatgaacagttatccatcctctgagtataatgattacagctgtgtaccatggtccgttgtgcacttgcacgccttactgtagatttcttttcttttctttctttttttttaatttctaaaagagaaaattaatgttgaagtggtttgtttactattggccgttcaatcaatgccctgatcacaatttactctatttattctcagggcagtcttagccccctgtaatgaataactctttattaattggactgttgagatggcaaagcaggtaatagtgtttgctatacaaacccggtgacttgaattagagccctggaacacgtgcaaaagttgaatctctgatctccagtttcatgctgtggcacataccattctccttcatcacacatcacacacaaagacaaacacacacacatgcatacacacacacacacttacacacacattcacacacatacataaaatattgataggcaaattcaaagaggaagaacacattaaactttacactgttatggatcagtagcttttgattttatatgaaaacctatgacgatctaagacgttaaggaagcttagtgacttactttcaaggtaaaatagatgtttagcactgtggttatttttgattcctcttaaactgctaacaaaatatgaggtattttacttagattatttctaattccacatagcataaatttagggctcaacatccagcttcttttctatatatctactgtatcattcctttttataaatatacaaagcagcattgaattgtaagctgagatggatcttagcctttcatcaaatctgctttcttcatttactatggaaatcttattatcagtaacattgcataattgaagaagtggcatctataccattccgacatcatagctttgtagtgattaattaatttttttaaagattttatttatttattatatgtaagtacactgcagctatcttcagatctctttacaggtggttgtgagccaccatgtggttgctgggatttgagctcaggacctctagaagagcagtcagtgctcttaactgctgagccatctcaccagcccctgattgattaatttttaaactaaatcatgaattagagattttcagttttttattttgaagctgagaaactgagttatagaaactctttaacttgctagtcatgctgtcagactgaaatcacgttcctaactgctgaacttatgttttttttttgttgttgttgttttatatttgctgacaaatataaactgactatattcttctaaaatattgttttgaaatatgtacatatgtgaaatggctcaatgagctatttaacatatacattacattactttatcatttttgaggccagaattgtagtctgtcttagccatattcaagaatcggatggtaagctgctagtgtcaccataacatccaatatcacttgaacttccgaaaatcctgaataactgaacatttatgttttttgactctaactttacctcctgcctctatcctgggagtcaccattctattctttgctgtatgaacgcagtttttctagattctgcagatcagtgagatcatgtggtgtttgtctttctgtgtctgacttgtttcatggagtagactagtctccaggctcacccattgttctttcaagtgaaagggtgtgctatgtgctatttatcttatttaaacacagacttttgttccattttgtatgttcaatgttttatttatctcttcatctactgacagaagttgtcttccgtgtttttgtgctcatgtgcctacatgcacaccagtatcagggtggaccgtatggagctgccatttttatgagtcagtaaccatcaaatgtcagccattttgtacagttcaacctgtaacaagtgttgccatttattgatcacacacaatgtttcaggtatagttcttggctcatttgttctttaaatttatttaatccttatatttaattgaaatttatactttacatcaatcaaactttttaaattccgaacaataattgaaaatagaaatttacaacataataaactttggcaaacttaggttcacagtggttagataaattctacagattgtgctacaacatgtaattctcatatatatatatatatatacatacatacatataatatttatacaatatatatttatatattacaggtataatataaaatataaacagatacgattatacatttttaattatataattatctaataagttatataatatacaatatatattacatattatataatatatggtaaagtaggaaaggcaatttttaggattttttttcttgccatcttatgcatacatctcagcgataaaacccatgctaccaggtttggcaatgattgtctatatatgctgaactctcttgcaggcctacattctttgttcttagctgaggttcatacacatcctctcacaatggtcctgaataggattgtttggatgtgtgtttatgtttgttattatacatttacatttgtcaataggtgcttgaccaaaagcaaagacaagaatattatattatgaaaaaatttagatttttttttatcttatttttggatgtgtaatttgcctctctgtacgtctttgtatcatcacgtgtctggtttcttcaaaagtcagaagaaaccattgaattcccttggactggagtattagaaggttgcaaaccaccaggtagttgtgaggaagcaaatctgggtccattggaagagcagcaagtattcttaaacaaagagccacctctccagccttccctgctactattattttgaataatgttattatatgactctcatataactttcttcatgttcttaaagaaagtgaaatcaatgaacactttatgagcagtggtatcagtatattattttgatatcttaaatgtcaccaaatctgacttcagagaactgactttgtgaattctcagggtctatttttgttttgaattcagcagaggccagtaatagtactagtggttgtgaatatagtagacatttactccaaagatgctttcctttgagaattagtcagcctgggaaaatgtgagggaggctagtagtcctgtgatatgtcacaaagaccaaaagagttgctatggtctgttaatgtcatctgatggatatacttagcactttctttgtgcagtcagagcaaagctgaatgtggaaagccaatcttctaacttatggtctgtgttccttcatgttcatcatgctaagcattgtgtttgtcatataaataatttttaaaactgcagaaccaaatctggagaggaaataacattgtaatttcttattaaagagaccgaaggttttaggatttctttgcagatgagattgaatcatggcccaaacattgcattgcctttaggatttggataaactaatatactctgaaatgagatttaagttctgaagattcaatgaaaaaaagcaggtggaatgcttagtatctggtacataagttcttagaaaatatagaaaatactgtttttattggatttcctctgtttctgttgttctgtctcccttttcatttatgattttattaatttggatattgcctcttggacctttagttagtttggctaagggtttatctatcttattgattctttcaaagaaccagcttttggttttggtgattctttgtattgttttctttgtttctatttggttgatttcagctctgagtttgagtatactcagtagaaggctctgccttctacttctcttggatgtgcttgcttctttttgttctagagctctcaggtgtgctgttaagttgttagtgtaagatctctccagttactttaccagggcacttagtgctatgaactttcctcttagcactgctttcattttatcccataagtttgggtatgatgtgtcaacacttttattaaattccaagatgtctttaatttattccaagaagtctttctttatttcttccctgttcaagttatagtaaagagtcgttcagtttccatgtgcctgtgggctctctgcagtttttgctgttcttgaagaccagcctgagcaaggtcactcgaacccaaaaggacatgcatgatatgtactcactaataagtggatattagcaaacaaacaaacaaacagacagacagacagacaaaaacccatacaaaatacccaagatacagtccacagaactcaaatagctcaacaagctgaagtgcccaagggaggacagctcagtcccacttgggagagagaagaaagcaatcacaagtggggagggaaagaaggacctgggagggaaagtggacagggtgggtgggggagtgggaaggagagaaaaaactgatctggtattgagagagggaaaatgactgaagctctgaaggccagcagaaagaatgtaaacaggcaacctcaggaaataggaggttgggaggacatcccagaatgcaccagagacctgggaggtgagagactctcaagacacaaaaggaggaaccttagatgaaactccaaacagtagggagagggaacttatagagcccacaagtgtgggatgaggttgccattccacagtcacatctgttcctgtctgaaagaattaaatggatgaaaatggaggggagcctgaggaaaagaaggtccagtgacaggcccaaagtgggatccagctcaaggggaggtgccaaggtatcaccctattactgaggctatggagagcttgcaaaaagggatctatttagactgcccttcgaaagacccgagaagcagctgaaagagtcagatgcagatatttgtacccagccaatcaacagaagcagcttaccacagttgttgatttagggaatgctgaaagaagctgaggagatgggcgatcgtgtaggaggaccagcagtctcaattaatctggaccccctcgatctctcaaacactggaccaccaagcagacagcatacaccagctgatatgaggcccccaacacacatacagtagaggacttccaggtctgtgctcattcagagatgatgcacttaacccttaagagactggaggccccaaggagtttagaggtcagatggagtggatgatgggggcatccatgtggagatggggtgtgttgaggaggaggtgtgggatgtggagcagactgagggtggatgaggtgtagggaattgaatatagtgggtaaaaaaatacattaaaatgaaataaaatttaaaaaagtttaagaaagaaaataaaatactgtatgtattagtatagagtatatctattatagttactgtatttatatatgaaacatttggtattaatagtgatgctgtagataccattcaatagtattattgtgagctattcacatttatgagtatacatgctaactggaattcaatggcatagagaagggaggaatttgctgagcatccagcacattacctgtagggaagattggtttgtccttttttccattattatagcacttacaggatgcttagtaaatagatattcaaagatgatgctgtatattagctacttatttggaacattttaatctgagtcatttggttgacctctgcttcttccttgcttcttgagagaagagaaatatatgttgttgttgtcgtcgctgtcacaaagtttgtaggaactttgctgattgttaagtagaatttctgtttgtggaagaagacttttatcattacgaaatcattaagaatgactgttattaatattaactgaatcttgggtttttaaacaagagaaatactgtctattttatgagattgttctgattctttaaaagaagttaaaataaaagagaaatcgtcattgaagcctcctcgtgtgcttgacatttgcctatattgctactatattttttccacagtagcgaatattcttcaaggtaaatcctattcataaggggacactaaggaatagaatttaaaaacgaaacccattgtgttattttaccaagtgtgaaaatgtaatttccttctttcctttcctgtattctcttcctttacaaccatatatagtaattcatattactatttgatatccaggaaaacacaaatatgttctagccatatccgggatacactgagaattaagatatgaaagtcaagtgttttgggaacggaaaatactacagatgtgaaagatgttttatccagtttgtgtctctcagcatccaacaaattctaatgtattgccatggtgctgtgccataattcccttgaagaaacatttgcagaaagacataagagtaggggtatccttcctgattgaaaaaaaaaaaagtacttaactttcaatgtcaaacacaccttccatttgcagatgtgactactgaagtgtgatttaaaatgtctgtgacatgtctacataataacgcttgtttagtagcaagttacttgaataggaaacattcaacaccttaaccctactcgctttatagttttctatatattgaagtttgtgctgtggtgaattttaatagtgtgcttgaatattttgtatgaaaataactttctttccagtactgacagtgggaacaatggaagactagatagaatgaaaagaatatggattttgataaatcttgtgtgtatgcgtttttagaaattggaaaactgaatttgtccaatgcttactatctgcaataaactaattcaacattgttttacatggtcaaatttgtttctatgaacttttaagttcttaattgtttgcaggtgcagaatatattaaggttattcgaagtaacacatagtaaaggcaaataaaatgagttatatactcagagtaaaacatttcatatacctgagattaaaaatattttttaaaattaaaatttgcttaagaaataatttgtgatgatgccttttttgaccatgtgactatactccctttcccagtgataaggttttcaatgtcatgacttcaaattacaaacaaccacatttaatgaaaattggaaagctcatttcagttgaaggaaagagatgggcagttgctcaagcaggttccatttctcccatgctgtgcttttgtgtctccttgtgcacctgccacttcagtatgctgttgcctatgtgccttcttaccacgccatccctgatttcaagctgaatgatggtgccctagggaaagaggagatatggaagtaaaaaggaggagttgtgggaaaagatgagttagaatgatgaggcagccctttacgtagtgctgatattctttggtcatgttactttataagttacatggggatttttgagctttgttagatattcttgatttgagaagtaggagcttccaattccattttcaaagtagattgaagtgaacaaagcaaaaatatcttttctttgttttttctatagtccatactatctaaggataacacttggcaaacatcatcagtggtctatattagtggatttcaactgatgagaaatgacttctcttaaatcccaagaatctaggttttcaataggaaggtctattggtgtttgctgttgagttgggagttgtctgtattccatttgttacatcttactctgcttttctgtagggttggaggtgggccttaactgtagaacctttcactgagatattttagtcctgcatatattttcaagtgtaagagataaaatgaaattctttgaagaatttgtggtctggttgactaggtccaccattttaaaagtttacttgaataaaactggaatattttattttagtgtgtcaaatataaggagaaaatgcactttgaatgcaagattttagatgtataaaatttaatttgatgttgtttttacatccattttaattttcattgaaaccaagtattggccattaaacttttctaagcatgatgtgactcttagctaaagtctcaaatatggaattaattataaaagtcaggagcatcaatgggaatatgacattgcatacagatcacggattttatggacaatggatcaaattttataatcttcaaattatattttatgtaactttttaaaaacccagggtcttgttcctttatttcaagttgaaaatacagatgtctactttgacttttaattttagaacagatgttgggaaattttgaaaatagtttaatgatgtggaatgaggcaagttttggtttgggtgttttgggagatcagtacatgcagcgattgtagtcaaatgtgctatgcctgatctatgggagaagccctgcttcgcttagatttcaagacaactatgctcagcaaagtctgttgtatcaccccaactcccactccccgccccaccgctgttccattcccttctgttgaaggtggaaaacacaacagtgtaatgtaacaaaattctctagctctttagactttattgtagtagaaagtagacaagatttagggttgggcataaacatcatcaacaaagagatgatggataaagagagatgattcatttctgcagtgcatttcaactaaagaagtaaagccacttctttacttctttactggatttactggatgcatttttattccctgaagccaagtgaagacagtttttaatgttctttaaattattcaccataatcagcttccaaacgctgacaccattgcatacactagcaagattttgctgaaaggacccagatatagctgtctcttgtgagactatgccggggcctagcaaacacagaagtgggtgctcacagtcagctattggatggataacagggccctcagtggaggagctagagaaagtattcaaggagctaaagggatctgcaaccctataggtggaacaacattatgaactaaccagttccccagagctcttgactctagctgcatatgtatcagaagatggcttagttggctatcactggaaagagaggcccattggacttgcaaactttatatgtcccagtacaggagaatgccagggccaaaaagggggagtgggtgggtaggggagtggggggtgagtatgggggacttttgggatagcattggaaatgtaaatgaggaaaatacctaataaaaaattaaaaaaaatttaaaaaaaatcttcaccaagcagtggtggcgcatgcctttaatcttagcaattgggaggcagaaggaagcaggtttctgagttcgaggccagcctggtctacagagtgagttccaggacaaccagggctacacagagaaaccctgtcttgaaacaaacaaacaaacaaacaaaacaaaacaaaacaaaacaaaacaaaaaaacaaaaaaaaccccaaaacatacaaacaaacaaaaaacaaaaaacaaacaaacaaaaaaaacttcagttctagattctggaagccagtgacttaaattgaggccacaggtgttacttgagatacagattttattgttttgtggctggtgatctcttcctttaataacactctctgtagaaatacatggatatgcttatagtcttgaattatattcatgttgaatattaactttcccagacagacacagtctagaagtaaatccctattgccctaggggatttgacacatggaagacaaggtagacataacctgacagaaatatcaagttctggtattgttttcttctctataaagaaagaagctataagctaatatttaatagctacatgttccattgacttgtattagacttttataaggaaaagctaccatttgccttgagagaaagaatctttctttttagaaataatagaaagaaatatagtatcttattacacacggaagatttaagttgacaataaggaaatctggatacagagtaagttaggctctaactgattggttacattttcattttaatgagaaaatacttccctagccttttatatttattttttgatttagtgtgtatgcctgaatagtttatttgtgagcatatatgtgtatgaacatttgagtgtacatgctgaagctagagagtgaaatcaagctatcttcctctatttccctccaccataatttttgagatagagtctctcatccaaaccacagctcagtgattggctaaaatgtctggtcagtgaccacctgtatctgcctatttctacacaccagaactagggatacagagaggaatcactacacccagtttttaccaatactctaggcaaggaacttaggtcttcatgcttgtgtggtaggttcttacaggacagatctctttcccagtctgttccatcaactttcctctggaagttaacacttcttttggaaactttcttttccctaggcactgtttaacctgagaaaagtagtcaattggagtaaaaaataatgtgacaattaagagttcttgggcactttatggacagtagcctcttaggattatttgaactcagttatagtttattaaagcatgaactgtttacactgaatacgaagtataaataaatcttttaacgattggttactgtgatccattttctttctctctttcttttttattacatattttctttatttacatttcaaatgttatcccttttcctggttttccccctttcctatccccctaccgctgctcaccaacccacccactcctgctttcctatcctggcattcctctacactggggcatgaagcttttttaggaccaagggcctctcctcccactgatatccaacaagaccatcctctgctacataaacagctggagacatgggtccctcaatgtgtactctttggttggtggtttagtccctgagagctctgggggtactggttggttcatattgttgttcctcctatggggctgcaaaccccttcagttccttcggttctttctctagctccaccattggagactctgtgctccatccagtagataattatgagcatccacttctgtatttttcaggcactggcaaagcttctcatgagagagataaatcatacttctgtcagcaagcacttgttggcatccacaatagtctaggtttggtgactgtatatgggatggatcctcaggtggggcagactctagatggcctttccttcagtctctgcccaatacattttctctgtatcttctcccatgggtattttactatgatctattttatagtggttcccagccggccagtattatgatttgatgaagccttatcaaaagtgttattgtttgttctgatttttaagtagcccttaacttaaatgccatttttactcttctcctctgcttcttcctcctcctccttgccctaatcccattctctactttcttcctccttctttcccttctcccatttttcttctttttatttattgttcctcatctgcttatcattttcttccatctttaatggtgttgtaatcaagcttatgaactgacacatactaagcaagtacctcactactcagctaactcttattttgtttttggtatgtgtgtgttgtttacatgttatgggtatgccttttttccctgtggccatgtatgggaactacagggcaacattgcatgtcttctgcatcaccctttactttatgttttttgaggtaggatttctcactgaacctgtagcaccctgattgtcttgactggtcggacattgcacttccaggattcaactgtcttttcccagtgttagaatgctaggcatgtacatttgatggattttggggatctaaactcagtttttcatacatgtgtaggaagaatattattgactgagccatctctccaaccctttagcacacgttttcttctcacatgaaatcttgctggcatggaacatctattctgttataaattcatatctttataatgatttattcatcatacaaactaaatgatgaagccattcacattagtaatgaataactgatttaagggcataagaaccatagtgatccagatattttagattatgattacaaaatcaacaaaataaaaaataacaagtacctacaaaaatattaacattttattataagcttcttcatggtgttgtctattatctgtatttatttgatgactgcatttagttttcccactcattcctcaaggcatattttctttccagtgattacctatttttttcttttttaaaaaattgtattataattatgtattttcttcatttacatttccaatgctaccccaaaagtcccccatacactccctccccacactcctgcctccccactcccacttcttggccctggtgttcccctgtactgaggcatataaagtttgcacaatcaatggtcctctctttccactgatggccgactaggccaaattctgatacatatgcagctagagacaagagctctggggggtactgtttagttcatattgttgttccatttatagggttgcagactcctttagctccttgggtactttctctagctcctccattgggggccctgtggtccatccaatagctgactgtgaacatccacttcagtgtttgctaggcactgagatagtctcacaagagacagctatatcagggtcctttcagaaaaatatgtagtatgctagtgtatgcaaaggtgtcagcgtttggaggctgattatgggatggatcctcaggtatggcagtctctagatggtccagtctttcatctcagctcctaactttgtttctgtaactccttctatgggtgttttgttcccaattctaagaaggagcaaagtgtccacactttcgtcttcgtacttcttgagtttcatgtgttttcaaattgtatcttaaatcttaggtattctaagattctgggctaatatccacttattggtgagtacatatcatgtgggtttgtgtgtgtgtgtgtgtgtgtgtgtgtgtgtgtgtgtgtgtgtgtgtatgtgtgtgtgtgtgagattgagttacctcactcaggatgatgccctccaggtccatccatttgcctaggaatttcataaattcattctttttaatagctgagtagtactctattgtgtaaatgtaccaaattttctgtatccattcttctgttgaggggcatctgggttctttccagcttctggctattacaagtaaggctgctatgaacatagttgagcatgtgtccttcttactggttgggacatgttctggatatatgcccaggagaggtattgcgggattctctggtagtactatgtccaattttctgaggaagcgccagactgatttccagagtggttgtacaagcttgcaattccaccaacaatggaggagtgttcctctttctccacatcctcaccaaaatctgctgtcacctgtatttctgatcttagccattctggctggtgtgaggtggaatcgcatggttgttttgattttcatttccctgatgattaaggatgctgaacattttttcaggtgcttctcagccattcggtattcctcaggtgagaattctttgtttagctctgaggcccattttttaatggggttatttgattttctggaatccaccttcttgagttcatatatatatatatatatatatacatacatatatatatatatatatatacatatatatatatatatatatatatatatatatatatatatatatatgtgatattagtcccctatctgatttaggataggtaaagatcctttcccaatctgttggtggcctttttgtcatattgactgtgtcttttgccttacagaagctttgcaattttaagaggtcccatttgtcaattcttgatcttacagcacaagccactgctgttctattcaggaatttttcccctgtgcccatatcttcgaggcttttcctcactttcttctctataagtttcactgtctctggctttatgtggagttccttgatcaacttagatttgaccttagtacaaagagataggaatggatcaattctcattcttctacatgataacagccagttgtgccagcaccatttgttgaaaatgctgtcttttttccactggatggtttgagctcccttgtcaaagagcaagtgaccatagatgtgtgggttcatttctgggacttcaattctatttcattggtctacttgtctgttgccataccagtaccatgccgtttttatcacaattgctctgtagttgagctttaggtcaggcatggtgattccaccagagagtttttttattcttttgaatagtttttcctatcctaggttttttgttattccagatcaatttgcagattgcccttacttattcgttgaagaattgagttggaattttggtggggattgcattgaatgtgtagattgcttttggcaagatagccatttttactatattgattctgcccatccaagagcatgggagatctttctatcttctaagatcttctttaatttctttcttcagagacttgaagttcttattatgcagatatttcacttccttagttagagtcatgccaaggtattttatattatttgtgactattgaggagggtgttatttccctaatttctctctcagcctgtttatcctttgtgtagataaaggccattgacttttttgagataattttatatccaactacttcactgaagctgtatatcagaattaggagttctctggtggaatttttagggtcacttttataaactataatatcatctgcaaaaagtgatattttgacttcttcctctccaatttgtatccccttgatctccttttgttgtcgaattgctctggctaggacttcaagtacaatgttgaataggtagggagaaagtgggcagccttgtcctgtccctgattttagtgggattgtttccagcttctcaccatttactttgatgttggctactggtttggtgtagattgcttttatcatgtttaggtataggccttgaatttctgatctttccaagatttttttcatgaatgtgtgctggattttgtgaaatgctttctctgcatctaacaagatgatcatgtgggttttgtctttgagtttgtttatatactcgattacgttgatggatttctgtatattaaaccatccctgattccctggaatgaaaccttcttggtcaggatggaatattgttttgatgtgtttttgaatttggttagtgagaatttattgagtatttttgcatcgatattcataagggaaattggtctgaaattctctatctttgttgggtctttctgtggtttaggtatcagagtaattgtggctccatagaatgaattgggtagagtaccttctgcttctattttgtgaaataatttgtgaagaactggaattagatcttctttgaaggtctgatagaattctgcactaaacccatctggtcctgggcttttgttagttgggagactattaatgactgcttctattcctttagaggatataggactgtatagaaagttaacatgatcctgatttaactttgttacctgatatctgtctagaaatttgtccatttcatcctggttttccagttttgttgagtatagccttttgttgaaggatgtgatggtgttttggatttcttcaggatctgttgttatgtctccctttttatttctgattttgttaattaggatactgtccctgtgccctctagtgagtctggctaagggtttatcaatcttgctgattttctcaaagaactagctcctcctttggttgatttttttgaatggttcttcttttttccacttggttgatttcacccctgtgtttgattatttcttgctatctactcctcttgtttgaatttgcttccttttgttctagagcttttaggtgtgttgtcaagctgctaatgtgtgctctctctagtttctttttggaggcactcagagctatgagttttcctcttagaaatgctttcattgccttccataagtttgggtatgttgtggcttcattttcattaaactctaaaaatctttaatttctttctttattccttccttgaccaaggtatcattgagaagagtgttgttcattttccacgtgaatgttggatttctattatttatgttgttattgaagatcagccttagtccatggtgatctgataggatgcatgggacaatttcaatatttttgtgtctgttgcggcctgttttgtgaccaattatatggtcagttttggagaaggtaccatgaggtgctgagaagaaggtatatgcttttcttttaggataaaatgttctgtagatatctgttaaatccatttgtttcatttcactgtatctctattttgtttctttttccattatctgtccattgatgaaattggcgagttgaagtctcccactcttattgtgtgaggtacaatgtgttctttgagccttactaaagtctctttaatgaatttggcttcccttgcatttggagtatagatattcagaattgagagttcttctagcaagattttacctttgatgagtatgaaatgcccttccttatcttttttgataactttgggttggaagtcgattttactcgatattagaatggctattccagtttgtttcttcagaccatttgcttagaaaattgttttccagcctttcactctgaggtagtgtctgtctttttccctgagatgggtttcctgtaagcagcaaaatgttggattctgtttgggtagtcagtctgttagtctatgttattttattggggaattgagtccattgatattaagagatattaaggaaaagtaattgttgcttcctattatctttgttgttagagttggcattctgttcttgtcgctgtcctattttaggtttgttgaaggattactttcttgctttttctaggatgtggtttctgtccttgtattattttttttattttttttctgttattatcctttgaagggctgggttcatggaaagataatgtgtgaatttggttttgtcgtggaatactttagtttctccatctatggtaattgaaagtttggctgggtatagtagcctgtgctggcatttgtgttctctttgtgtctgtataacatctgtccaggattttctggctttcatagtctctggtgaaaagtctggtgtaaatctgataggcctgcctttatatgttacgtgatctttttcccttactgcttttaatattctatctttatttagtgcatttgttgttctgattattatgtgtcaggaggaatttcttttctggtccagtctatttggagttctgtggacttctagtatgttcatctttctttaggtttgggaagttttcttgtataactttgttgaagatatttgctggccctttgtgttgaaaatcttcattctcatctactcctattatccgtaggtttggtcttctcattgtgttctggatttcctggttgttttgagttaggatctttttgcattttgcattgtctttgattgttgtgctgatgttctctatggaatcttctgcacctgagattctcttttccatctcttgtattctgttgctgatacttgcatctatggttccagatttctttcctagggtttttttatctccagtgttgcctcatttttggttttatttattgtgtctacttccctttttaggtctagtatggttttgttcatttccatcacctgtttggttgtgttttcctgtttttctttaaggccttctacttgtttggttgtgttttcctgtttttctttaaggacttgtaactctttagcagtgttctcctgtatttctttaaatgagttattaaagtccttcttgatgtcctctaccatcatcatgaggtatgtttttaaaaccaggtctagctttttgagtgtgttggggttcccaggatggggcgaggtgggagtgctgcattctgatgatgttgagtgatcttggtttctgttagtaacattcttgcgtttgcctttcaccatctggtaatctctggagttagttgttacagttgtctctggttagagcttgttcctctcatgattcctttagcctctatcagcagacctggaagagtagttctctcctgagtttcagtggttagagactctctgcaggcaagctctcctcttgcagggaaggtggacagatatctggtgttcggacctgcctccctgcataagatgaaggcctgaaacagggcttgtcccagaatctgtgtagttctgtagtccacactctcacctgtgcagactagtcttgggggaatctgggaacccaagatggctcccccagatgctgtggtaaagaccccctgggcaggacagacacccctcctcttttacctattttaaatgattgtcttttttaatgatcatgtattatgagatcaccaaaagtaagaggcagtctggctttgacactttacctgtattgacacttgataacttaaggagatgtgaagaatccaaggtaaaatactctgacatagaggtaaatgttccttggggtgacaacaaatcactgagaaatgctgtaggcttgtcaacgtatcagaaaagtggagaatagacatagagtgtggagtgaggtgtttactctaccaggtcctcatagaaaatggaagcctttaactggagttagaaggctgttgcagtttgtctatttgtcatggaggcggcataaggtcaatttgtgttgcagatgtgatagaaagagtgtgagctggggatagggaagtgaggtttggagttataatgtggtctaatttaagaatgcacctgggagctaatctgagccacatatgaaaatatagcttcatggccttatgacatcatcaatttggcttgtcaaaaccaacaattacataaattgaggcaaaaatggtttagaccaactgacttctgtagactcacaagactacagactagtaactgtcagtagtttcttcagactaggttttgctcagttccagagtaagtctgagttgctagaaactggagaatagaagaggattggctactcttgggtgttaagatagagcagtcttgaattctagtcctacggttaaattagatttcttgaataattacttttagttacccttttttattcctaatggaaacatgttcattcatccactgtctaataattgcttagaactttctttgtttgaatttattagatgtatatgagcaaaataaagctcaccttcataactgtaatggggaccctaacctatagagctgaaaatggaatggctgaaagaataaacactaaagagactagccgtgtttgtggagggctagagtggaccctgttgctagggaccactgtactaagttctgtgttattcagtcaactctatatattcctgtgtgatatatgtagtattatctctttgtttttcttcagtttccgtgtgagaaaaatgatattgaaattgaataagttttccctaacttcccacagctagtaaatgcacttcaaaattaaatttgcctggcttcaaaatgtactttaaatagcaatagcatgcccaggtgtttcttgaggtgtacaacacaaaattgtttttcttttagagagagagagagagagagtgtgtgtgtgtgtgtgagtgagtgtgtgtgtgtgatttatgaatgtgtgtatatgggtatgcacaggtgggcatgagggtgtatacactctaatgcaaatgtgaaggaaaaagtgagatgtttcttacagccttactctcttgagatggctttcttactgtacctggacctaggctggcagcaattaagccatcattcttctgatttgactcctgcattgctggagttgcagacacatggccttttccaactttttatgtgggttctgggacactgcactaagcaaacattcttacccactgagctatttctctagcttgctccccatcatgagataaaaaaacaaaaaacaaaaaacaaacaaacaaacaaaaacaaacaaaaaaaaaccctagaattttagaaagtaaactaaaggtatatttattttaagatagtccaccagatcatcaggcatttccatcagaccgaaatttttggagaaactcttgtaaagacttacatgtaatgataggaaactgtataggctttgtaaaacataagagcagatgaattggtaaggaggtattgtagtttggaggagtactacagaggtgtctaattcctattcttctctgtgctatgatttgtagttaggaaggtgacttacatggaggaaattggctgtttctccataaaataaagtgcagttaacttaaatacagacagaatgatgagcagatgacttgccagtctgtgaaagaactgtggctttaaaacttgaatgtggacattcacttggtttaattaaactatgtccatgggtgagaaaaatcaatcaaaattaatcttacaggggaaaaagggagatatattttgacaaatataaataccaaatcacaataaaatatacttcatgaaactctgaggtatttttatttttattgtttctcaaaatggctaattgttgcctcaccaagaggaagctacagaagtgaccagatatacaaacttcctattaataccccttaggcctttttaaatgcctttaaataccagatttgcacagccttttacttgtagaatgtcacatttctgaaaattgtggaggaaattcctagttggagaaaaaaaatgttcatttgagaattagtttaacagaaagggtacctggtgtgttcttctggagtcagctaattcacagattgttttttattgaatccttttaatagattgccaagaattaagatggagaagaaaaacacatacgtgtgaagctttaaatctaggcaaagttaagaagaaaaacagaatggtggactcatagtaaaccttatttagtgagctgtggcaggagcaaattctgtacctgtgctcttatcttcatgtttttctttctaatgtagaaaagaaggattagtgcttcatggtgactcccaggaatcctgcttatacattgtgaactcaaggacaaccattcttgggtataattgtcctataatatgggatcttagtatgacagctggaagcagagtaaggaatatggtaatcttcagtgctgtcctttgtgtttgttgagatgctttgggaagtgtcttaaatgataagtgacacttaaaattatttcaagagtgatagaggccaccaactacattcaacatgaaaaaaaaaaaaaaaaaaaaaaaaccaaaaccaaacaaaccaagatcaggccaggaaatcatccccttctcagactctcttatcttctgttttagatatccatttcaggaaattgttctccagtgcagctgtgtgggcggaagttaccaggaaacagatttcatctcctcaaaaaaaaaaaaaaaaaaaaaaagacagggttgaaggtggacagactgctgtctccagaggaattaaaacaggatgtttccttttggatgtagcctttcagaggagagacagaccctaggttggatggaaagagatgaggtccttatagtttgtaaagaaaaagtatgttctacaacaaataatggtgactatatgaagtaatgtaagtgctaagctccctcctcagacttccttgtagtctgttaattgagcacagacgttactaaacaccagccagtccctttagtgcttacatctctgcctaaaacgcatttgctctgtgctatgttctgaatatatggatcctctcccatttcgctaccatgatgatggctttaagaggtgaggtcttttgttgattaggtgaataggccataaggttagagtctgtgagacagactagtttacaccatgaaagaagaaagaactcatggctataaggaagtcattcttaccatgaaatctgccttaatcatgaactttgacactccgagaattgtgagattaaaatatttgttgttcatagagtatttagcttatagctgtcatatcgcatcaacagtggaccaagtcactctgacctgaccttgggataaaggcaaattctaacccagacatggtaatggatgattattttatccaggatgttgaggtggtgggaacttacattaagttagcctacactatatagttgtggacaagcgtgggctgtaaagacactgtactcaaaaacaacaaaacaaacaaaaacagagaaaaagaaagactggtcttattcaatataatttgtataatctagcgtggttttccccagctgcttctcaagcttcctgttgtccagcccactattctaatgcaaatctattggtcaactttaaaaacaaaattatgtgtacgggtgtcaggagacttgagttatataaccacaaaagccagaagttagtgttggattatcttggatttggagttatatgaggttgagaaccaccacatgggtggtgggagctgaactcagattctcaaccaaactgacccatctctccaggctctgttcagggcaggctttgtgagtcctatatacactatgcccccatttgtcatgcacaattattcattccattgttttatgtaagatatgtttcatttacagatgactttggtttcaaaagatttggataagatttcagcattttgtttaatcaggaaaagtttagaggtctgccatttagatctaacttacctgtcagatatagataccctatcttcatttatggcgtttgtttctgttaaactacacatttgcttatctgacaatttgattagtatctgagtcccccactacaatgtaagtaccctaaaatgcaaatgtacttactattttagtttacaagttgtgtattattagagtgtgtaacacagtaaatatgtgatgaatgaataacgcaagtgaagcagataatatttgctgtaggcatggagaaaagaacacttagagaaatagtatgagatagtggccctaaggcacatttagctttatatcctgcctgcattttaagttattttttcatgtttcacaaagccctaaaatctagtattattcgattaccatattatatatttcatattatttatgatattcttatattatttatttcatatagccagtatttataatgttatattagattagatttataggctgttcagaagctacagataaagactaaggagcagatttaagctatgaagccttgtgtttgaaaattcaggatcttgtacccatatgttatattgtaccattttgtaattgggcagttttgatttggcttccttaacagcacagcataaagagggtgacttaagaggcagctgttgttttcttgttgctgttgagtctgggatatccaggaacaagcttccagtgtgtctgggaaggtggggggcatcatcaggccttgcaaatggctgctttagaggtgcattttaacaccacaatgaaaaccaatggatataaacacacatgcagacagatgtggaacataagctagtcttttcttctctaggatttctagttctttcctcggtgtctgattcctttaagctataattttccaatatgctgaagaatttcaccgtgagagctaatgcttcaagaaataaactgggttggggaggggaagagcaagcagtctatagcaagaatatatgcctgcctactcgtttaaagtgcatttgtagtctcaaaattaaatcacaccagaaattctctgttaattatctgtctcagaactttgggacaaaccatgaactatgaagatcacactgccctctagtgacaactggcttcctgagatgtggaatctctagacagcacaatatgagatgcttgtgagcctgtggcagaaaagtgactaaataaaaataagtagacttagcaatcatatcagtgtagagtgttactcaagaaataaggaggtgaaatgtttcccataacaccattttaaaagtatctgtctccactcttctcattctctcctatttcaaaatgtatgtgttttgtactcgcggaattgatgggaaagttttgttttagcttttttttttttttaagtgtattcaggaagcatatgtgaggaaatgaatcattggtaaaatttccagttggattttgcatcatagaaaggaaaagaattccaaaataaactctgtacttcccaaaggaacatttaaagtctctttgatttgaattactgtgtgatttaatgtaaataccataattaaacactcccagacatgcaatgactagtaatgaaggaatgtacatttttttataaaatattgaacatcaaagaaaatagacataatttatttgtatttttaagtgctgaacttttatgttgaattagaccttagtgtatacatttcaagatatggcttggtatattaatactgcagataatatagccatctagaattccttgggttaacattttcttatcatatcctgacgccagatcaaaagaaataacaggaaatttctctgaagtcctagataaacaacaaacacatcactctgaagtgataaaaaaaaagaaaaaacttttctgagtaagaaaattgtattaaatgtcttcattaaacagcccagagaaaatgatgtttatgtgtccatgtaagtatacttactgaagtatatttgtaatgtattctaagtcctgacatggaatagtctggtggacatgctaattacattttatcttttaagggaaattactgctttttaagcaaacactgcttttcctttctattctttgggagcaataattcatatgttgaaaacaacctcatcttagaagagtcaatattttgctaagtactaatatggggctcttgggggcatggacacattaaagtcaagaaaaacatctgttttgtacatgtatcttagtattctttaagcaggttcatttggtgcctacttctggaaaaatgtacagatgggacactatcatttattcttgtgggtagtacttgcgagaatataatttaattcagtatctgaaaactgtatcatcaataccagagagtactgagtttccaaaatatgtgttaagcaatgtgattgtgaagttgtatgaataagagaaaggctatctgtgattaaaatcgattactgatcttgaaaatagtgttcctattatagatatcagcattttattaagttctttctgtgtagcagttaataaattaacttcttcctgtatataatttcctttgtttattgtattttttttttttttagattgagctgctgtagttgttgttgtggtcgtcaggggtggtgttgaagcagggcttcaccatacaacataggctggtttgaaactttgatgtatctcttactttccttgaaatttgctaccctcttacttctgcctcttgagggttttggttttagatgttcaacaccattcctagctgcttctttattttaactgtacagaatctactcactgttgatcctcagttcttgcaacactgggatactttaggcatgatgctaattaatgtttttatgctcactaaaattctaatgtaatctcatgggtgcacttatagtcacaatattttgcatccatactcttgtaagtcctttatcataaacacatacttttctttttatatcttgcaagagattcccattattatgcaacttgggtttgttgttagtctactattgaaacaaaatacttatgttttatataaacacttgctacataatataatattttaatatttattgtgagcatttaatgattttagaagtgctcacgtgtacagaatatttatatttatgctccccagtgcagaatgtacacacacacacgcatgcacacacgcacgcacgcacgcactcatgcacgcacagctcttgaaaattcatacattgtttttgatatttaagttatttttttaattatttttaatcttttttttttttttttacattccagtcattacccccttctggtctgcactccaagagtttgtcatcccattcctcctccaccttctccaagaagatgttcccacacctcactcaaccccaccctacccacaccctgggacctcaagtctcttgagggttaggtatatctctcactgaggcaagtctagacagtcctctgctgtatatgtgttgggggcctcagacaagctcctgtatgctgccaggttggtagctcagtgtcagagatgatcttagggttgaggttagttgagactgctgttcctcctatggggtcaccctccttcttaacttcttccagactttccataattcaaccataagggtccccaacttcagttggggtgggtgtaaatatctgcttctgtcttgggcaactgcttgttgggcctctctgaggccagccataggctcttgtctgcaagcacaccatagcatcattaatagtattaggccttagagccttgccttgagatggatcccaatttgggctggtcactggacctcctttccctaagtctcttctccatatttgtccctgctgttccttccgacagggacaattctgggtcagagcttttgactgcaggaatacaaccccatacatccacttgttgctctgtctttgtactggaagtggactctacaagttccctctccccactcttaggcatttcatctaagttccctctctttgaatcttgagaatccctcacctcccaggtctctagagggtgctcgccccccccccccaatctcccaaggttgcctgtttccattcattgtattggccatcaaggcttctctcttttctccccccaatacctgaccatgttccctgcacccaactctcccacctaggtccctctttccctctgctacccgagattgctttttttctctctcccaagtgggactgatgcatcttcacttgggctttttggcttgttaaccttctcgagttctgtagattgcatcctatgtatgctgtactttttaggctaatatccacttattagtgagtatataccatgcatgtcctttgggtctgagttacctaagtcaggatttaaacatttctttaagtgctgcccagccattagagaatcttctgttgtgaattctctgtttagttctataccccaatcccccccccccaatctgtaggttactgatttgttcaattgactttgtcccctgccttacaggagcttttcagtttcatgaggtctcatttatcaatttttgatcttagagcataaaccattggacttctgtttaggaaattcccccctgtgccaaggggtcaagtctctttcccactttcccttctattagattcaggttttatgagctttgtgcaaggtgacaaatatggatctattatcagtttcctacatacctgctgccagttagaccattaccatttattgaaggtgctttcatttttttctattgtatatttttggcttctttgtcaatgataaagtgtccataactgtgtggttttatttcttgttcttcagttctattccattgatcaacctgtctgtcattgtaccaatacagtacagtttttttttttagatttatttatttattatatgtaaatacactgtagctgtcttcagacacaccagaagagggcgtcagatctcgttacagatggttgtgagccaccatgtggttgctgggatttgaactctggacctttggaagagcagttgggtgcccttacccactgagccatctcaccagccccacagtacagtttttaatcattattgctctatagtgtagcttgagttcagggatggtgatgtttccactatcctagtttttttttttttttttttttttttttttatatgaaatcgagaattgcaatttccatgtctttgaagaattgagttggaattttgatggggattgcattgaatctgtagactgatttaggtagaatggttattttactatgttaattctaccaatctgtaagcatgggctatctctccattttctgaggtattctttgatttctttcttgagagacttgaaattctttccatacagatctttcacttgtttgtttcgagttatgtcaagatattttattttatttgtgactattaggaaggatgttgtttccctgttttgttttgttctctccccttcccaggcagtttatcattcgtagaaaagaaggctactgatttgttttaattaaatttgatatctgaccactttgctgaagttgtttatcagctgtagaaattatctggtagaatttttgtgatggcttatgtatgctatcatatcaggtgtaaatagtgatacattgacttctttgccagtgtgtcaccaccttgatttctttttgttgtctaattgccctggccagaacatcgagtactatattagatagatatggagagattgggcattcttgttctgtccctgattttagtgggattgcttcaatgatctctccatttaattaaatattgttggtctgctgtatgttgcttttattatgtttaggtatgggccttgaattcctgatctgtattgtattttgtcaaatgctttttagcatctcatgagatgatcatgtttttttttttctttttagtttattttatagtgtattatgttaagggaatttcatgtattgaactaaccttatattcctgggatgaagcctacttgatcgtggtgaatgatggcttcaatgtgttcctggatttggtttactagaatttttgagtatttttatatggatattcataagcgaaattggtctgaagttctttccttgttgagtctttgtgtgatttaggtacaagagtaattgtgccctcataaaatgaattaggtagagttccttctgtttctatattatagaataatttgaagagtgttggtgttagctctttttaaaggtctggtagaagttttcactaaagccatctgggcctgggttgttttgttttgttttgttttgttttgttttgttttgttttgtttttgaaggttttaaatgatttctattttcttaggggataggggctgcttagatagtatacttgctcttgatttaactttgatatgtggtatctgtctagaaaattatccctttcatgtggatgagtttccaagtttatgaatataggcttttgtagtaggatctgataagtttttcaatttcttccatttctgttgtttgtctcccttctcgtttcagattttgttattttggatatgctctctgtgccctttagttagtttggctatgggtttatctatcttgttgattttctcaatgactagcttttggttttgttgatttttttgtatctttctctttgtttctatttggttgattttaaccctgagtttgactacttctcctgggtgtgtttgcttcttcaggtatggtgctaagttgctagtgtagtatttctctaatttctttaggagggcacttagtgctataaattttccttttggcagtgctttcattgtatcccataagtttgggttattttcattgaattctaggaagtctttaatttctttcttacttcttccctgaccaagttgtcattgagttgagagttcagtttccatgcgtatgtgagttgtttttgttgctattgaattctagccttagtccctggtgatctgataggatgcatggaatcatttcaatattcttatatttattgaggttgtcttgtgaccaattatatggacagttttggagaaggtaccatgaggtactgagaagaaggtatattcttttgctttacagtgaaatagtatgtatatatctgttaaatccatttggttcataacctctattagtttcactctgtctttgttaagtttctatttcaatgacctgtccattggtgagagtgatgtgttcaagtttcccactattattatgtagggttcaatgtgtgtgttcaagggattgagactttctcttgttggattttccctttgatgaatatgaaatgtccttcctcatctcaattaataacttctggttgaaagtctatttcataggattttaggatggcttctcctgcttatatcttgcttcaaagacttttttccagccttttactctgaggtagaatttgtttttgttattgaggtgtgtttcttgcatgcagcaaaattcttgatcctgcttgtgtatccagtcagttagcttatctctttttattggggaattgagtctgttgatattgagagataagacagataattcatacttcctgtttattgttataggtggcattatatttacttgattctctctttttttttttgctctgagatgattaatatcctgttttttcttagtgtgtgtaccctccttgtgttggaagttcccttctataattctctgcaggaatggattgatagatattgtttaaatttggttttgtcctgaggtattttggtttcttcatttatgatgattaagagttttcctgggtttaggagcctgggctggcatttgtgttcctaagggtctgtataacctctctgcgggttcatctggcttttagtgtctctgttgagaattctggtgtaattctcataggtctgcttttacatgttacttggcctttttttcctgtacaggttttagtattctttctttgttctgtgcatttagtgttttgcatattttgtgacaagaggatttttttttctggtccaatttatttggtattctatatgcttcttgtaaatttatggctgtctctttctttatgttagggaagttttcttgtatgattttggagatgtttttgggtcctttgaacctggaatcttcactctcatctattcctagtattcttagatttggtcttttatttgtatcctgaatttcctggatgttttgggttaggaagtttttttatgtttcaaattatctttgaccatcatgtcagtattttctagggtatcttttatgcctgagatttcctcctctgtctcttgtattctgttgttgatgcttgcatctgtttttcctggcctgtttcctcggttttccattttcttttccagggttctgtgaactgagtctagacatgagtcctttgaaagaaaaacaagtactcttaactgctgagccacatctccagtccacattttgtgtttatttggcagaatcttaatgctattttgtgtcttaagaatatgttttaataatttcatacaaagtacaatattttaaaaattcccacctgtccttgcttctccacctcctctttttctctctactccctatattttgtctttattacctcttccacaattattgactctaataaacatgtacagcttattatgtccatttactgttctttgtatacacatggggtagggctggccacttagggtgggataacacactgagtgctctttcttgcaaagactgattctccattttctgcagccaatgattgactgtagttcttcatctagttgtgaactttattaattttccccaggtatgttgagatgtcagcttgtgtagtcattttcacatcttatttaggcatccatattattgagatttcacaggtgcagcatccttttcacgttgacactatttcacatcacgaaccctagtcctcagccttatgcaatcttaatattccattttctgtgatgtcccctgcaatgttagatgtgctgtagttgtacagtttgtagctgggcaccacatgacttcctactctgtattttgtctcttagggatttctgtaaatacttcatcttcttcacaaataaacttctttaataagggatgagaagtacttgtgttacttttttggtgttgttgtttttgtttttgttttttgagacagggtttctctgtatagccctggctgtcctggtactcattttgtagactaggctggcctctaactcagaaatctgcctgcctctgcctcccgagtgctgggattaaaggtgttgcacttgtgttacttttgattcttttaaacttacaactttcgctcaataattctaattataagcataccagctttgagattagttaattcaaattgtataagaaatgaatttatatgatttttattgctaagttctaagtgaattattgcattgataaaatgtactttactttccctatcttttaacatgcatactaattttataactcattttttgagttatctataatttggttatagccaattaagaaacaatatgattagatatttcatcaaaagtctgtatctgatatttccatcatgactattaatcctaataacacgatgactttcaaaacattatggatgtgtggaatcaattagattttgcttttccaaaggactgtcattatgttagggcttagcacaacattctatgaagaccagaacttgtttttggcaaacaacatgtgtatgaagaagcagtaggcaggagcaagtcagggcctctaaccatggagttaagagccaggcataaggaaagattagttattgctcagatattatttctctctatgaatggatttgtgagaatcaaggcaatgcaggaaacttcaagtgtgattccaagtcagacacatatatatttatgattgtactaactgaacagggggtggtgctggcaaggactctagtggtaactcataacccaagaacacagtgaaacacgcagtcttgacgggagatgaaattcaagatcttgacttggctagtgagttatactggtaactgagatatgatgtatgtgtctcatgggaactattggtgttagcttgttctgtttcaagattttcatcccataactttcgatgactatttatttgccatgtttttaacatgagataaaaacacataatctgattaaagaatttaccttctacaatttctgtggctttggacaagctatttcactttttcaaatctctgaataaatcatcttcaaaatttgtggaatagtttctttcttacaaaggtttgaaaacatcttttattcattgaagtacataatgtacttcagatgatcaggcagtggtcccaatggcttttttacatatatatgatgtcagctttaaagaggtgaggttgttgttacttcttgctttatgagtatttacaataatcccttttatatttcttataaaaattaagtcttgaattaattaataatacatttgggcacacatattgcataatataataatgtaatggctgtcttgtcttcatttcttgccttataaacaacacatcatagcttaccagcttaagtcctacatccatgttgcttgtttgaatcatttggagatattgcagaaattgcatacatatgttaccacaagacactgacctgagaattcctggctgagtagctctcattttgttaacagcttactatttatggggtggcagaacctaccttacatagttgatctgaggatcaccataaaattctgttccaaagcaactaaagtaaagtgatcttaattttagaaatgttgtactcttaggaagatctgcaagtactaagagaaacaagagaagacaaaagtcaaagaagtcaaggaagtcacgagaagtcaagatgacaacatgctgtatattgaatggagcaagagaagtatgttggaaatcccatttccaccaccatttagtcaatactttttgggtgtcctttgattaaaaacaaaactagtgacctcaggcacaaattctacaatcctacactctccagaggatgatccatgccccaggttccctagcacacccaggatcttaggattccagcatccacagataccaagagcttagtcccaccaggatataagggtctcagaggaagcttggctgccaagaactctgacacacccagaatctcagcttcacaggatcccagaatcacaggatcacagagaagttggattctgaggagttctgactcaaccaggattacaggaaggacaggatccaatcagatatattgagggcaacaagcacttgagataatcagatggcaggaggcaagcataagaacagaagcaacagaaaccaaggttacttggcatcatcagaaccaaactctcccaccatagcaagtcctggatacactatcacatgagaaaagcaagatatggatctaaagtcacttctcatgatgatgatggaatactataagaaggaaataaataactccttaaagaaatacaggaggatatatccaaactggtgaaagaattgaacaaaatcacccaggatctaaaaattgaagtagaaacaaaaaagaaatcacaaagggagatctctttggaaatagaaaacctagaaaagaagtaaagagccattgatgcaagcataaccaacaaaatataagagatagaaaagagaatctcagtgcaggagataccgtagaaaacattgacacaacaatccaagaaaatgcgaaatgcaaaatgtttataacccaaaacattcaggaaatccaaggcacaataagaagaccaaacctgaggataatagatatagacaagaaggaatattctcaacttaaagggccagtaaatatcttcaagaaaattatagaagaaaactttcccaacttaaagaaagagatgcccatgaacatacaagaagcctacagaactccaaatgttttggtccagaaaagaaattcattctgtcacataataatcaaaacaccaaatgcacaaaacaaagaaagaatattaaaagcagtaggggaaaaaggtcaagtaacatagaaagcagacctacgagaattacacctgactccccagagactatgaaagccagaagatcctcagcagatgtcatacagaccctaagagaacacaattgccagcccaggctactatacccagcaaaattctcacttaccatagatggagaaaccaaggtattctatgaaaaaaaacaaatttacactatatctttacacaaatccagccctacaaaggataataaagggaaatctctaacacaaaaaggaaaactaagctcgagaaaaagcaagaaagtaatatttcaacaaacctaaagaagatagccatatgaacagaattccaactctaacaacaaaattaacaagaagcaacagtgaattttccttaatgtctcttaatatcaatggactcagttccccaataaaaagacatagactaacaggctcattatgtaaacaggacccaactttttgctgcatacaggaaacccacctcagggacaaagagagacactactttagagtaaaaggatggaaaataatttttccaggaaaatggtcccaagaaacatgctggagtctccattctaatattgaataaaatcgactttcaacctaaagttctgaaaaagataaaaaggaacacttcttactcagcaaaggaaaaatttaccaagataaactctaaattctgaacatctatgctgtaaattcaaggacatccacattcattaaagaaactttgttaaaactcaaagtacacattacacctcacacaataatagtgggagacttcaacacaccaatctcatcaatcaacagatcctggaaacagaaactaaacagatacatagtgaaactaacagaagttatgaaataaatggatttaacagatatctataaaacgcttcatcctaaaacaaaaggatataccttctcagcatctcatggtactttctccaaaactgagcatataatcggtcacaaaacaggcctcaacagatacaaaaatattgaaataatttcatgtaccctatcagatcaccactgactaaggctgatcttcaataataacataaataatagaaagtacatggaagctgaacaaaactctactcaatgataacttgatcatgaagaaataaagatattaaagactttttagagtttaatgaaaatgaagccacaacattcccaaacttatgggacacaatgaaagtattcctaagaggaaacctcaaagctctgagtgcctccaaaaagaaaccggagagatcatacactagcagcttgacagcacacctaaaagctctagaaaaaaaaggaagtaaattcacccagggggagtagactgcaggaaataatcaaactcagggctgaaatcaacaaagtggaaacaaaaagaactatacaaaaatatcaaccaatcaattttctttgagaaaatcaacgggataaataaaccactatccagactatctagagtgaacagggacagtatcctaattaagaaaatctgaaatgaaaagaaagattccatttaatttccaattacaacagaatctgaggaaatcgaaaataatcatcagatcttactacaaaaatctatactcaacaaaactggaaaacctggatgaaatgaacaattgtctagacaggtaccaggtaccaaagtaaaaccaggatcagactaattatctgaacagtcccataacccctaaagacatataaacagtcattaatactctcccaaccaaaaaaagcccaggatcagatggttttagtgcagagttctataagacgttcaaagaagcctgaattccaatacttctcaaatgatttcacaaaatagaaacataaggtactctactcagatcgttctatgagcccacaattactctgatacctaaaccacacaaagatgcaacaaagaaagagtacttcagaccaatttccttatgaatatcaatgcacaaatactcaataaaattctcacaaaccaaatccaggaacacgtcaaattaatcaccaatcatgattaagtaggcatcatcccagagattctatgatggttcaatatatggaaatccatcaacataatccaccatataaaacaaactcaaagacaaacaccacatgatcattttattagatgctgagatagcatttgacaaaatccaacatctgttcgtgataaaagtcttggaaagatcaggaattcaagacccacacctaaacataataaaagcaatatatagcataccagtagccaacatcaactaaacagtgagaaactgaaggcaacctcactaaaatcagggactagacaaggctccccactctcttcctacctgttcaatatagtacttgaaatcctagccagagcaattagataacaaaaggaggacaaagggatacaaatcggaaaggcaaaatatcactatttgcagatgatatgatagtatacatgagtgaccccaaaaattccaccagagagcccctaaacctgttaaacaaattcagtgaagtagctggatacaaattaactcaaataaatcagtgacctttctctatgcaaaggataaacaggctgagaaagaaactagggaaacaacaaccttcacaatagtcacaaataatgtaaagtaccttggtatgactttatggaagtgaaagagctgtatgataagaacatcaagtttctaaagaaagaaattgaagaagatcgcagaagatggaaagatctcccatattcatggattggcaggattaatatagtcaaaattgctcttttgctgaaagcaatctacagattcagtgcaatctccatcaaaattccagcccaattcttcacagagttaaaagtgaaatttgtaaattcatctgaaataccaaaaaaactaggatagcaaaaactattctcaacaataaaagaacctctggtggaatcaccatctctgacctcaggctatacttcagagcaattgtgattaaaaaaaaaaaaacaaaaaactgcatagtattggtacagtgatggacatgtagatcaatgaaataggattgatgaccccgaaatgaacccacacacctatggtcacttgatctttgacaaaggaactaaaaccatccagtgagggataaaacaaaacaaaacagcattttcaacaaacggtgctggctcaactggtggttagcatgtagaggaatgcaaattgatccattctcatctccttgtacaaatctcaagtctaagtcgttcaaagaactccacataaatccagagacactcaaagttatagagaagtggagaagagcctcaaaggtatgggcacaggggatatattctcgaatagaacaccaatggtttgtgctgtaagatcaagattcggcaaatgggacctcataaaattgcaaagcttctgtaagacaaaggacactgtcagtaaaaccaaaaggcaaccaatagattgagaaaagatctttaccaatcctaaatcaggtaagggaccaatatccaatatatataaagaactcaagaagttggtctccagaaaaccaaagaaccctattaaaaatggggtatggaactaaacaaagaattctctactgaggaataccgaatggctgagaagcacctgaaaaaaagttcaacatccttaatcatcagggaaatgcaaatcaaaacaaccctgagtttccatctcataccagtcagaatggctaagatcaaaaactcaggtgacagcagatgctggcaaggatgtggagaagaaggaacactcctccattgttggtgggactgcaagttggtacaaccactcgggaaatcagtttggcagttcctcagaaaattggacatagttctatcagaagatccagcaataccacccctgggcatatacccagaagatgatccaacatgtaataaggacacatgctcaaatatgttcataacagccttatttataatagcctgataatgtaaagaacccagatgtccctcaaccgagcaatggataaagatagtgtggtacatttacacaatggagtactactcagcaattaaaaacaatgaatttatgaaacttttagacaaatggatggatatggaggatatcatcctaagtggggtaacccaatcaatcaccaaagaacacacatgatatgcactcactgacaaggggatattagcccagaagctcagaatccttagaagagggaacaaaatacccatggaaagagttacagagacaaattttggagcagagcctgaaggaacggccatccagagactgccctagttggagatccatcccataaacaaccaccaaactcagacactatggcagatgccaacaagagcttgctgacaggagcatgatatagctgtctcctgagaggttctgccagtgcctggaaaatacagaagttgatgctcacattcacccattggatctagcagaaggtgcaccatgaaggagctagagaaagtacccaaggaggtgaaggggtttgaaaccccataggaggaacatcaatatgaactaaccagcactcccagagctccttgaaactaaaccaccaatcaaagaaaacacatggtgaaacttgtggctcttgctgtatatttagcagaggatggcctagtcggtcatcaatggaaggagaggccctaggtcctgtgaaggtactatgccccagtatagggtagtgccaggaccatgaattagagtgagtgggttggggagcaggggggccagggataggggattttcagaggggaaattaggaaagggtataacatttgaaattttgaaatgtaaataaagaaaatatctaataaaaaatgaaaaagaaaaaaatctttataggctgtgagtccatggccagatgtagaatacaaaccctggtaagtggaaaaatgaagttgaaagcaaagaacagtttcatcaatagttaacattttagtcaggtttgaaatgtcacaaatatatgagtgatagtaacaaagaggaacatgtttgccttgtgttttgaaaaagagtctcagttgtagctcaggctgaactcacaacctttcattatctacttcctgaatactggataatatgatacctactttagaaccttttgttttaaatcctttatcttgaaaagtagacttctccacacctcatgaatctagattaattttgacttcataacccatggtcatgaagtatgtgtaggccacctaagctctcaggtgcaggcccaagtacacattatcatggatgtgaagagagtcgcttcccttgcagccatgttcatcagctattttgccattgacccaagagtcagtgagttcttgtcaatatttggccacatgtcactatcattttcctgaggaaaagcactagcaaaatatcctgtcctcttgttggcagaggattaaaaaacaagctcaggacagatgcctgagcattgagcccaaggtaagggtcagaccctcactgagatttagccccagtggctttctctgtctttagaaaagacagggctagtctccctcacattgagttccattcagagaactgttctaaatccgttctagacaaataacaacatttcctgacacattctggttgctttctctagtacaactacagtatttgcatctcaggcttctctaatggttaagaacaaaaacaaggaaaggggatagcatttgaaatgtaaataaagaaaatatctaataaaaataacattttttaaaaaaatgaacaagaacaaggaccatcttatggaaagagctattgggagggaagatttatttagggcagttttgtaaaataagttactcctgatttccattgatctgtcatcaaagtatttactgcctgctatttccttctgtgctgtacaatggtgcttgaagcagcgtccttaagttggcattttagttctgtaacttccaagctggtggttgttttcgttgtgtaaaatattaatatcaggatggcactttgttctcccatatagaagagatattattaacaataattatttccttatgttccaggagttaatataaataaatataaagttgtcaaactgtacatgaccagtaaagatagacaaggtatcttcacatatgattataggatttattttgtataattctttattcaaacatgaaaagtattttaacagtgatcaaatggaaatggatttcctaaaaaagctaaagcaaagcacactaaaatgacaaaataacttatatatttaaacttgtgaattacagttttactagacatggtcttttgtcaaattactaatttgtaacaacattatgagctgggtgtgcttagctaagtgagttatacgcagaagacaactatcctgatgttatttacatttcaaatttaacaatagttcaatccacacaatcaaagagtagaataatgactgccagggacttgcagtgatggtcaagggagggaaaatactagttgaagtgtagattggagggacaagttctgatagccagttaaacagtgtggaattcccaagtcagtaacatattgtatgttttacaatgctgaaaatagtggaattgcaagtgatattagtgccaaaaattggaaagtattgatgctaagtaggaagtgatgttagtctggtttgagattttctacactgtttatagtaatgcttcacattttacctaatgaatgtgtagagtacttatttgtcattttaaaataaaataaaatttaaaaagaagtgataatagaagagtgctgaaaacatgatatgagattacaaaagcaatggaagtcctagtaacattgggatatttccaatcctcagatcagggaaacactcaaggggaataaagttttaagatgatgctgtagcgaaatcaaactacagggtaaagagcttgaagacaagtgtatgagaatgagtaggctgggcagaaatggagaaaatatcagagagaggtaagaacacaaatccagtttcttttcaaactcttctgagcttgtcagtgaatacagatttctgtgcaacttgattgtggatgtatagaacacacttggatgagatctcaggcatcttccatctaggattgtataagaaattgaccctgaaatgaaaaagtatattaaggtgattatatcaccagcaaaatggagaaaaaataagttttaaggctagtgagagtagaaagaacttgtttgggagctttggtaagatcaaagaaactctacagcattcttgaaggaattggcatttaacatggtccttaacaagcgaggtgacacatacaacttcagaccacaggctgcttttcctttgtacttgactctgttttgacccttgccttatttgttcagctaggattgtgtttaagcagagcatctgcatctgtcctgaacctcaactgcagcctcatccttttacctatgtgccggacagtcctggcttatcttcgaggatcacagaaggtacagaaaagaaaatcttattcatgaatttctatggcaggatctagtgtaataatcacgtattagttgttccgtttttatgagctggttttatttagaatatctcttctcagtggtggtaagggatacattacctttaaaagtggtcagacaactattctgtaaactagaccagggaagaagatcacagacatatcatccaccatgcttacaggtactatgttcagtgctatgatgactcctaactacaactctataatcagacactactggttcaatttaagcttgagaacctggggtatggaaaatgtgaccaagccaagatcagctataaatgagtggcagagctaattccagctcttagagcttctctactgtatcagacctcattgagattggtgttttatttagaaaatccaggtgagcaagccagaggactgtgttctttgagtattgttcaaaatgattgctactgtttgcaatttccaattgcttaacacacatgactccttgtgagctatgcaaaaggcttaaatagatgattgtattgaatagtgatcctcaattcaaatgtttgttgttgttgttgtagtaaaatgagaggggcaagaaagagaactactttgtcattaaaaaaaaactgcatttttttctttaattagtgctttctgtaagtgtgagcatgctcatgtttgtatgtatattttgattttctactaaaataatgagggattcatggataaataattacattttcagaggttttagtgatctttgaagtgtgtaatgctgatttactgaatcaatattttttttagttttctaaggtaattatatttggaaacactttattttcgcagtattttatggaaatagcattccctaggttgcctactattgttaaatgctaggatttgatctctactggtcattggcttggcatgaagagaagcactataagtgccagaaagtgaaaagttccctcgtatgtttctcagtaggtaataggtcttaaagagttgttgcccagtatgaagcacagatattcaaaaattcttgacatttatttttctacaagatcaagccaacatttaaaaccacagatcccattggtctaacttaaaaataaccttagggttttgcagcacaaaggatatactatattctattaaatttaaattttaaaaattatatataccaggttttcagaaagtttcccctgaatgtggtccaacagaacaactgctcatgacagttggggacaaatgtcatcatagacatttatgtacagtgacattttgtggaatcacagtgtagtttctaactgtgtcatctaacagtttatgtttttcaggtgtttttttcaagtaaataacatcttttcacattcatttgaaagggttcagagactagttatgccacggttctctcacttttgactaggagacttgtgttgaattttcaatatttttcatgatatgatcaatactgtagtgaacatttttaagcatattttgactggttgtattatttttactgtattaaataatttttatttaggtccctagcaggagaacaagaagattgttggataaaagcaagactctacacatcacatgtggtgtaactatctgtattttctcaggtgagagagctaaaaggcactattttattagaattgtatatgttaccaaggtagaaagccttgattgtgttgttctgtatgttttcaactctaatgatcttatttgatgattttctagttatttatgttagtgcctcttttgtgagagttagaagagagttgtgagggcagttacagagcataggtgtttcttgtggcattttgcattaagttttccaaatgctagacgtaagctcatactgattttcttgtaatagtaaataagttcatttgtaaagtttaaaataaggagacttactccaggcttaaaggtaagattgtattacataaaaatgaatattagaaatgtgaaattttcattttaaaataggattctaggtcaagatgtatttgataagtattatttatattgatgatataaattgtatagaagaatagactttacatctgtgtaattttatctggattcatttcaagttagcaaatgtaaactttaagttttaatcttgaatatttctacctaatatgatataagtttaagtatgtaaatagtgatgagtatccatgattactgtatcataatgaacattttcattgttctgagcatacttagtgttctgcaagttcatgtttctcttctctctgatatgatacattttcccccattaactgatttatttatgttacctcctggttgcagatccactctcttctctattccccattcctccctcatgaatccttatagaagggaaagaaccccacttgggtaccttcctactgtgggacatcaaattgcaacatgggtgcagaagggtcctaggtccagcctctgcatgtttttttggttggtggttcagtctctgtgagccccgtgggcccaggttagttaacgctgtaggtattcttgtggtatccctgactcctcttgctcactcacttacatcccatactcttccacaagactcctcaatgtcctcctgatgtttgactctgggtctctgcatgtgtttccatcagctgctgaatgaagccattcagcagaattatgataggcttctgtctgcaaacattgctgagtatcattaatggtgtcataaattagctttctcccattgtattggtctcaagttgggtcagtcattggaatattacctcaatctctgcctctattttttttccctgtgcatcttgtaggcagaacagattttgggtcaaaggtattgtgggtgagttgatgtcctccttcctccactggaagttctacctcactataggaggtggccacttcagtctctatgtcctgtgctactaggggttctcagctatggacacccccatagattcctggcagtctccactgccccaggtctccaaatattcccagagatgatctctatcaatttctgttctctttctcaacctctctcacccaaccccatctccccacacctgatccccaatctcactgatcctcaacctcctctcatccagatcccttattcattccacctccaatgtctattttatttactctttggcatgaaattcaagcatcctcctatgtgccctcctattagtttctatgagactgtggattgtggcatagttatcctgtactttatggctaatgcccacttataagtgagtgaatgccatgtgtgtcttcgtgagtctcagttacctcactcagggtaatattttctaggtccgcccatttgtctgcaaatttcatgatgtctctgtttttaatagctgaattacattgtttagatataccaaactttctttttctattcttcagttaaggacatttaagttgtttgcaatttctggctattactaataaagctgctatgaacataattgagcaagtgtctagtggtatagtaaggcatattttgggtatatgtccaggagtgttatagttgagttttggggtagaactattatcagttttccaataaaccatcaaattgatttccaaagtggttgtacaagtttgtacttccacaagcaatggaggagtcttcctcttggtctaatttctgtccagcatatgctgtcacttgagtttttgatctgttccattctgatgggtataaaatggaatcaaattgaaaacccagaaataaacccacatacctaaggacactagactttttttttgtttgtttgtttttttttttttttttttttttttttttttccgagacagggtttttctgtatagccctagctgtcctggaactcaccatgtagaccaggctggcctcaaactcagaaatctgcctgcctctgcctcccgagtgctgggattaaaggcgtttaccaccacgcccggctggacgctagacttttaacaaagaagccaaaaccatacagtgggaaaaaaagaaagagtcttcaacaaatagtactattctaactggatgtctacatgtagaagaatgcaaatagaaccacatttatcacgtcacacaaaactcaagttcaacgggataaaagaccttaacataaaaccataaatatcaaatataatagaaaaaaaagttgggaacttccttgaatacattggcacaggagacattcctgaacagaacaccattggctcaggcactataatcaacaattaataagtggggacctcatgaaactgaaaaccttcagcaaggctaaggataccatcaataggaccaaacagcagcctaaataatggagaaagaactgtattcaatgtacatccaacagaggactaatatttaaactataaaaagaactcaagaaattagacaccaggaaactaaataacccattttaaaaatggtatacagatgtaaacagaattctcaaacaaaggaatctctaatagctgaaaaccacttaaaaacatccttagtgctggttcaactggtggtcagcatgtagaaaaatgcaaatcaaacctttcttatcttcttgtacaatgttcaagtccaagtgtatcaaggacctccacataaaacaagaatcactgaaactagaagaaaagaaagtggtgaagagtctcaagcacataggcacaggagattatttccttgaattgcgtcacatattaattcatagattctatgtaatttctattaaaatgttaataatattccttatagaatcagagactctaacactacaaattatttggaagtaagaagaaaacaaaaacacaatgaaaagccaaagcaattatgaataggaggacatcaactcacccacaataccttagacccaaaaaagaacaaagattgagtcattatgctttgtaacttcaattttgattaaatttattacagaattataatttagtacaaaatttcatacaattagtgcaaaagtaaaagtacaaaagtataacaaccagagaaaataatgcagggctagagagataattttgtgactaaaaggacttcgactcctccagaggaccaaagttatatttccagtacccaccctgagtgtgtcacaattgcttgtaactctatttccaaggaatccaacatcctcctctggtatctgcaggtacgtgtgcacatgtggtatatgtacacagagacacaagcacacacacatcttttgaagaagagcgaacataatcttgacatataaaaaaaaaaggctttatagaatcttagctattactcagtgggtaaaagcaatttgccatacaagcctcttgacctgagtttgtgagctccagaacccacacaaagagccacatgcagtggtgtagatcagtcatccatgaacacttacagcaagttcagagacaggagaatgaatggaagctcacagggctacctagttaatctagaatatgttgtgtagtagaaagaaaagaaacctttcctcaggaaggtagaaggtgagaactaactcttgaaaattttcttgaacctcttttgctctctctctctctatatatatatatatactatgacacatgtatattttgttacttaatttaaaaagaagacacaaagagaaatgaggcagagttgtgtgtccagatataatcccatgcaactgtagtcacatgattctctacacagaagccaaaatcatagcagataaacatgagcattgccgtgaaattgtgcccagcaaactgtcttcacatgcagaaaagtataactctcaggctaaagaaaaaccgacttaaaaggagatcagtgacttacctgtcagatggaaagatatcagggttaagagagatggctcagcatttcagagtgctgctcagttatgaggactggacttcaaatctggttgttcataaaagataataactccagttccaaaggacccagaacagtcttcggcctccattggtacctgcccacatacataattgtacatatattgatacagatacgcacaattctagatcaattttttttccattttttattaggtatttagctcatttacatttccaatgctataccaaaagtcccccatacccacccacccccactcccctgcccacccactccccctttttggccctggcgttcccctgtactggggcatataaagtttgcaagtccaatgggcctctctttccagtgatggccgattaggccatcttttgatatatatgcagctagagtcaagagctccggggtactggttagttcataatgttgttccacctatagggttgcagatccctttagctccttggctactttctctagctcctccattgggagccctgtgatccatccattagctgactgtgagcatccacttctgtgtttgctaggccccggcatagtctcacaagagacagctacatctgggtcctttcaataaaatcttgctagtgtatgcaatggtgtcaatgtttggatgctgattatggggtggatccctggatatggcagtctctacatggtccatccttttatctcagctccaaactttgtctctgtaactccttccatgggtgttttgttcccaattctaaggaggggcatagtgtccacacttcagtcttcattcttcttgagtttcatgtgtttagcaaattgtatcttatatcttgggtatcctaggtttggggctaatatccacttatcagtgagtacatattgtgagagttcctttgtgattgtgttacctcactcgggatgatgccctccaggtccatccatttgcctaggaatttcataaattcattctttttaatagctgagtagtactccattgtgtagatgtaccacattttctgtatccattcctctgttgaggggcatctgggttctttccagcttctggctattataaataaggctgctatgaacatagtggagcatgtgtccttcttacccgttggggcatcttctggatatatgcccaggagaggtattgctggatcctctggtagtactatgtccaattttctgaggaaccgccagactgatttccagagtggttgtacaagcctgcaatcccaccaacaatggaggagtgttcctctttctccacatccacgccagcatctgctgtcacctgaatttttgatcttagccaaaaacaagaagataatccctcaacaaaatttttgaaagtaggtgggtgggcccatccttccactgggagccctgtctgtctactggaggtggtcgtttcaggttcatctccctattgttgggtatttcagctaatgtcatcttcattgagtcctggaggcctctcgccttccaagtctcttggactttctagagattgtgttgagtttttttttttttaaagtgggcttaatattcagtagttctaggactgtttattgacaccctacatttttcttccatgtgttgtctctgctctttattaaaacactaatgaattatattcatttgaaaaggtttttgggttctctatttcattattccacttgtatattcttctgccagtaacataccctcttaagtactgtacgtttatggcactttttaaataaacctaatattaatgcaacccattttgatacccaacttgttagcctgaattataattcctaaaaataaacttttaggttatttggcattttcagcctttcttgccttcattgttctttgtgggtaattaatagtatttggtgattctgaattttatagtctacgttttacactctgcaaactcttctatttttcaagccattcttccctttgaaacagcacacttcataaattattttaacctgtagtgactagttaataattacagaacatttatatctttcattactgtcttcatgattttacagataaattgaaaactagtagataggttataggaccaaggctacaggagtgtctttaatcaatacgttatcacagaatgttaatgtgtacctcatttaaccctaggggaaaacagattaggaaaggaggaggttttgaggcctagttgagcagatcattttccccctcctttcctatcttgagataattttcattgctgactatgaacaaatgggttatttcaaacttctagtaattctctgacacatgcatcttttatatgagtatgagctcagagtcagatgagcactgtgctggcattgcctttataggttgattggttgtcatgtggtaatcactattttccagaggattttttttttccatgaagtgcctctgaaccctttactgttgagtttagaaaattatctattgattgtgaaagatttcttctggttagaagctgttcagaaggctgcaatttgggaatgaatgagagtgaagtgcataaggtagagtgggttagaactatttgaaagatgaactgtgtgaaatacaaagggatccaggaaccagtaagcagtttattgaacaaatgaatgtttgtaatgatagatgcaaaaccttaaaatgtgtgtgtgtgtgtgtgtgtgtgtgtgtgtgtgtgtgtgtgtgtgtgtgtatgtgtgggtgtgtaactgtgtgtgtgtgtgtctgtgtgtgtctgtgtctgtgtgtgtgtttgtaggaggagacattaagttagaatcttctctagatcttaacctacattactatagttatttaactctattttttgaaaatttagtaaactatctatattcaggtgactttgattttgtgttttagaatgatttcaattcaatatttttttgctcatgtacctattgcagttctagttttaatctctaattgtttatggagaacaaatgacgtctagccaaggatcatatgtggaacccccactaacctatacctggtgtggttctgtaggtgtgcatgtagccgcccacttggtgaatgccctcaacttttcagtgaactacagtgaagatttccttgaactgaatgcagcaagataccagaatgaggtgggtggtctctgcttttccattttctgctctcttgtcattagataactaatgagggtctgcgatttttacagaaaatctgtaccttgctgctcctttgagtgcttttaaaatgcagttgtcaagttgagttttattccctttcaatagaaattgcaggtaattactatgctatagtttctcctgctgaaaatgggagtttgcagtgtctactttttatatcctgcaatattcagaaggttgccactcaggtctgctttctgactcccagcagcttttgtctaattcctaccatttagttgagagtgtcgacagtgccaatctcaggaaaaaaaatactttaataactcacttactgtgcttgggtggaaaagggcacagctgtaggttgattatttgtcgatactaaataatgaatttatttgacttaaaaatttattggttttttttaatgagttctttattttcatgagatagatgagcttgagctgaatttacaagtatgtgctatctaacttagggcaatgttgttccttatgatcttttatatgttcatgagattaaattctatgtgctgagccagaatcagatgctcagcaaatatatagcaatagtcaggtctatgttgcttagtactttcccagtgtcttcagagagtcattatttcccaaggtcatgactatacccaagccaaactgctgactctctgaccttttctgataaattacagtgacctaacctgtcattaaccattcccctcatcccagactccatttttttcttttgcatatcatgaggactctcacagctaataccactctaatcatctgattatcttcctaaaaggaaacaaactgtaaaactgaatgccgcaaataatttctgataaatctcttgcctctactagtgtctatagacatcaatatggtggggctagtctgacgagggcctgggcattgctggttttaaaaagaatgagcaggtgattatgtactgcacacaaagttgagactcactggagaatctagcatcttagctttctcagtgacagctctccaaatgtcatgatttcagactgagttctacttctcacatctccacttcctctccctgaactgtcctccagccctattgtcatattagcaatggttgcttgtttccaggctgcactccagtttcctttgcagatcatttccttttatgttcctctttcttaaagtcatccttctttaatacctataaatatgtttcctactttcttactatgtttagttgtccaatattccactatgttggtatttttagtcttaaaattactttttggttgagcattgaacccaatatgtttaacagctatcttggttgtaaaggcagaataataatgaatttataaatttacaatctgctggtcagcataatgagacatatatacatcatataatgtatgttatatgcaatatgtatatttaattttgcattataatttaaactattgtatctcaaaattgttgaagaaacaccaccaccattagagccagcctgtaattagatcaataatctgtcctaatttggtcaatgctctctcattttctatgctggtaagacttctctagttttgctttttataatgcaaaattgttctgaggcttaattaattgagactatcacttgtactggatgaaaggtgctgtcattcctaatatatggcaacacacctggtaaacttcttgtataggtttgtgtcactagcattttattttccagtcaaatgttttactcttttctattctcaggatcccagaaagcttctcttcacaaccagtaagtttttattgtttttcaacaatgaatgaaacaaaggtttttgaaaataagcatagtcaaattatacatcagttgatacatgctaaattacaacattctatggttgatattaatagtttatttatgatgctgcaatgccagctttttcaagaaatccaatagtttgagtcttggataaataaagaaaatcagtaatcagacacattggttcgctattcagtttttggcaatttgctcaactgaaaacactataatcctcatgtctcatgaaggcctgctatagcgggtgttgtggcaggtaatatacatgttcttgctctcagagtagaagggaaaatattggactattggtgtttgtgtagttctagcaattgagttgtcttgaagtgatatgagggacatgatctttaaacccatgaatgggaaatttattaaaataagttatatgttggggcactgttatttttcatttacatttaattgttccctgttaatattcatttgtaatgtcagtctagattatttgattgtaaatgcacaactttacaacccaaaaattaaccctaatgctggagaaagttgcactgcaaggatgctttcagcgtgtatgtcaagtatgagggggattggggcattgagacaatctgtgataaatgattagcagtgattaactagtaaggataaaacatgcacagtgactggggcatattacccaattatatgcattgcctttccttagttttatgatgaaaaagtaatgtaatttatttacatctatccttctacgtcttagagtcataaagtgtttttgttctgatgacaaaattattgcataatcatgttacagtatttcacagttctctattcaggaacagaatttagttttgcttagccttttgttcatcaataacatgttttgactgaaattttagtgactggatggaaaaataaaagtgaaaagagtatcaaaacaaagcattatgtacaaataaatacattttaaattcacatgaactaaatcaaaagaaagaacagaactgcgtgttaagaatattttctatggggctggagacatggttgactcagatgttaagagccggctgttattccagaggtctgagttcaattgctagcaaccatattgttgctcatcaacacctatagtgaaagctggtgccctcttctggcctgtaaggcatacgtgcaagcagaatgttatatatatataagtctcaaagatatgttgcatgacttcctaaaacaaacttgttttttaattaatattttctactaaaagaagtttaatgaaagaatgccttgagatttttaacattcttcaaaatctacagtttcaaagatataaaatatattgatgtaggtattacatcaagacaaagtagcataattgatgcttctgactatgtagaagatcaataaacccagataaaacctcattgtcttgtgttcttcactctagctctagtagagactacattccatagagaccttttcatattctcaggaatagcacctaggtaaagcaacagtctttgagatgcgatttacacattataaggtttttctaacatagtcattattcttggttcttttcttgtactgtagtgagtttaatattttattgtcttctctcttggtgcctaattatgttttagtatacttagaaattatttcttaaaactaacggccgtaaaagtacaatatagtagttacacttagtatttgggaaatgaaaagagtattgaaagtaagaatttatacaataagttcaatagttttgagtatacacacatccctttaaaaatgcttctgtactaaaaatttcctagttcaataatatattccatgatgagcataaaatatttgacatttaattaaaataagaaaaatgtgcataaacaaacacaattatgtttttaattaagttaaaagaagtaggataatgagtagaatatgatgtgtttccaactgaattttgtgtaagggaacaaatgtggctcagagtcattcacacagggtagtataatacaattgtgtattgtaaagtatcacacagggaggtttagtacaactgtgtattgtaaaggctactaattagttgctttcatatgagtagatatgaataaataagaaaacacatgccagttttctttctcctaaaaataaatatacatatttggctttattttttgagaggatcaagtattttcagaaaaataagtgtaattccatataggcaagtttagctttgcccagtacaacttgactagtgattaattttagtctgtttttcctgtgtcttggaagttgtatccataaatggctaatagattagaacttagctcagttgctaaacaagggtacattggggaccattcaatgtttcagggatgattcaatgtttgttacttaaaatcctctatgctgcaatttctatgttgtttaactgccctggatgtaccactagaccaagatttctcattagagaagcttcattttatatctaatggtacacttggaatgccaaccaacgattaattgaacacagaaaaccacttttttatatgtttaatttgatgcagagagctacacaactatccacataataagttatttagcttttgcctgtttacttgaactaagtaggacctggggctacattgagggggtctcaatccttaccttttcagtaattttaattacaataggtaatatattttgatcaggagttctctgggactaaatccaaggattgcacactttggggaatactctgtgactgagctatatggactcctaatcatttgacagacagattcctgcacatgcaaatttaatgcttctttattcataggagccaagaaattgaactaagatacatatatgtgatcaaattttatttatcagtgaaaaaaatgaaatcatgacatttacagaaaatggatggaactgggagttatattaagcaaaataagccagagccagaaagccttcgttctttctcccacaataaattcctactttaatttttatgtgtatgtatgcatctgtgtgtgtgtacatgtgtgtgtgtgtgtgtgtgtgtgtgtgtgtgtgtgtgttgagggggtgtggatatagaccaggaaaccaaatatggagtcatggagagaggattggaaccctaaagggtgaaatggggaaaggagaatagtatgaggtgtgtgacatgcaagcagaaggaagggtctgtgtgagattaagagacctggaggaagagaatagcaagagcaaaagtgggaggagacttgataggaacaaagtatgaataaaaatgtcataaagaaacccaatgtgttgtatgctggattaaaagaaacagtgaaaataacttggatatataaaaaatgcaaaaaatttagataaaaatattttatcaaaaaaaattaacaatcattaaatttattccctgtggtatgcagaacaaattcagcaagatttgactttgccaatggtatcactacaagaccataatgtcagatcaatttgaactttggctcagaggtcttggcttctctttcatcttccagtgacaagagtcaagcccgcaatattccatgccacatacctctccatctctgtcccttcctctctccctttttccctctctttcttccttcatgctcttttcaagcatatcctacatattttctgtgttctatgggtggaatagaaatagagtttgttacagagttttgcgtgtccctctctctcaactgtctgtctgtaattatgtataacactgcctatgcagtttatttgctctttatggtctgtgagagcatagatcatgatttttccacatgatggtttctggcatcagcacagacaatgaacaaaactccttgctgtagttggaccacagataaggtcccccagtacaactgctaacacggatatcaacatggcatcctgccacagcatagaacacaacctgtcttagttaggttttactgctgtgaatagacaccaagataaaggcaactcttataaaggacaacatttaattagagctggtttacggtttcagaggttttgtccattattatcagggtgggagcatgacacgcttagggctggaggggctgagagttccacctcttgttctgaagccagctaggagaagactagcttccaggcagctaggatgagggtcttaatgcctaagcccacctactccaacaaggccacacctccaaatagtgcctcaccctgggctaggcatactcagaccaccacacgggaatttggtacttacatgggccacagacatccctacagacttggcttcagtaagaccttggatccagacatggctcccagctgcatcataggttgtgaacatcactatggccccaggtggcggcattgacgactgacatcaacatggtttaaggctgcaggacagagagaccatgaacattcatatgacttgggaataacacacaggccatgagcaccaacacagaccttgtatgtagcattaagaccatggcaaaaggatggaccatccagagtctaccccacctggggatccatcccataatcagccatcaaacctagacactattacatataccagcaagatttcactgaaaggaccctgatatagctgactcatgtgagactacgccagtgcctggcaaatacagaagtggatgctcacagtcatctattggatagaacacagggcccccaaaggaggagctagagaaagtacccaaggagctgaaggggtctgcaaccctaataggtggaataacaatatgaactaatcattaccccctagagctcgtgtctctagatgcatatgtagcagaagatggcctagtcggccatcacttggaagagaggcctcttggtattacaaactttatatgcaccagtacaggggaatgccaaggccaagaagtgggagtgggtgggtaagggaacagggcagggggagggtacagggaactttcgggatagcatttgaaatttaaataaagaaaatatctaataatagtaataataataaaagaccatggaaccagacatggccctctgtggcaggttgttcctgggcaaaatctgcatatgcttaagctctggcatgcttcacaccattccatagtcctcacatgatcggccatcaatctcagccccctctctctctccctgtcaacagttcagcaactctccccagtgctctcatcattccacttctccatctctctcaattctccgccttgaagtagtaccccaggctgtgcaagatcaagtggggattgtttctacccagtctggccctgctgactcccagcagggtggacccacagttgcttttctaaatttctctgtgcaaattaatcagcacatttctactttttacaaggcgaaacaatttatcttcttttactcaagtctagtcatttgaaggattcatctatactgatgcttaatattctagtatttcttcccatgtggtaggaagcaatcacctagaggaaatggaaaatactgctgtgaaataaataccatagggaaaagtggcccagaagacataatttgtattaggagtatcagacaagggaatgattcctgatggcactaagtccgtgtgaagggaaatttgtttctaccatagtgagaggtctattattattattgtccacttgctctgatcactttgctatccgaatgatacacacaagcactgtccctacactgatccaggactggttgttactttagtggttatatgtcagtgaaagtattaatgttccatacttgatgcccaaacaaacagagaagtgggaagtttatatatttctccaaatagaatttgttgcataagtttcttttggcccaatttcaggcacccagatgggtaatttaggattgattactatatctatagcaccagcagaacatgataatgaatacctttaatcctatactcaagaggcagaggcaggctgattttctgtgagtttgaggccagcttgatcttcaaagcaagttcaaggacagtcagatctgttcttttttttttttttattctttttttttattattaggtattttcctcgtttacattttcaatgctatcccaaaggtcccccatacccacccccccaatcccctacccacccactccccctttttggccctggcattcccctatactggggcatataaagtttgcaagtccaatgggcctctctttgcagtgatggccgactaggccatcttttgatacatatgcagctacagtgaaattctctctctctctctctctctctctctctctctctctctctctctctctctctctctctctgtctgtctctctctctctcttttcatatatgcagagaaattaattttatagtaatatcatagtaaatgatctatttatattttaacttagatattttgtcatcttgtgattctgaattctgatttgtgtatggtctaatgctaaatttgtagctgtaaaaatgatcattaaacatctgtgcaagttttcctatttatttaaataaattttatactatatcaaaccactggttttacattttataatgtgtgcgtgtgtgtgtgtgtgtgtgtgtgtgtgtgacagtgtttctgtgtatggggagtaggtcagggaacaacttgctggactggcttctactttcactgtgtgaaatacgtggataaaattcaagttctcatgcttctttgaaaacacttttacctgctgagctatgtcttagaccctagaatgctgtggatatgaagagaaaatatttctacaagctttcttcaaatagcatcacagagtggtaatattatagataaggggaaagaaagattataagagccagaaggctagaacatctgtttcaagatagtgtcttctacatataatagggaaactgcccccttaaaaactcaacaatatgacagcttaaacaagaccctccatgttttcaccattatgaatagagcacttggcaatgtaagaatagatgcctctgcgccaggagcaaaggaaccagccttggcggaaagctgggatacttgagtctgtgctggttttctaacagtttgtctgaggagttgtatacacagagaaataaaatttgaattcgttttccgctgaatagtgtactgtactattcatactatagtactgaattatactttagatgttaaggtaataattttcttccagtatgaattaagtcaaaatgtacttgtaaatgttcttacagttcctggtctgacgggtgtctgcatggtggtggtattgttcctcatggttacagcttctacctacgcaataaggtaagggtcagactgacgactgagactactttttattcatctgtccaggttgtccagattttccacttatttttactttcctacatatgtgaaaagtcttggatgattaaagtatttaaacagtgcatttagtgagtgggttattctgggttaccacagctgaaatagaaacattccaatatttcatttacattttttaaacgatttattttatttataagagtacactctagctgtcttcagacacaccagaagagggcaccagatcccgttacaaatggttgtgagccatcatgtggttgctgggaattgaactcaggacctctgatagacaagtcagtgctcctaacagctgagccatctctccacccctcacttaccttttttttgaaaattatattttattagtcataaggagtactgtatggaaatttctactgaatactaatggaaatgtagattatgtcagaatcgtttttagaaaacattgttggatgtgaattggaattttactgtgtgcccacagaccttgagaggaatttatgccttaaaatattttacagctgattacctgatgatagttttttattttgactataatataaaatagtgttctaaataaagcttcaaaacaaatttgacacctgtttaaatatttagcaacactccaactcatactgattttttttcagttaaaatcttttttttttaattttattttggtttttcgagacagggtttatctgtgtagccctggctgtcctggagctcattctgtagaccaggctggcctcgaacccagaaatccgcctgcctctgcctcacgagtgctgggattaaaggtgtgtgcctttaaatcttttaatggggctagggatatgacccagttgggaaactgctcacacacaagaatggtatcaatctgtagtatcaatgtgagagtcgggcatagtgcacatctgccatcctaggagtaggatggagatacctatatataggatataggatacacacacacacacacacacaaacacacatatatatatatatatatatatatatatatatatatatatatatatatatatatgtatgtatatatacttgaccacaacctgtaggtatatgtgcgaatgtgtatgaataaataaacagacaaataaataaacaagtaaagatttcagattgcattgttcatagtattttcatatcttgtttgtttgttttttctggtgaacacattccacttcagaatacaagtatcacatatataagattaaactttttgcttgaagcaaaaaaaattcttataatttaaatttttttaggtatttccttggccgagatatgaaaaattacgaagaaaaaaatgtttatatggtttgaaaatatttggaaaatagttttttcaaatgattctcttgctgtatttctatgtacatccactcataaccatacctactcccgctcatcacaaaagattagtgctgtcatcctgcgcttagtttcacacaccaggcttcatgttcttgcttattctgtgctgtcccaccagcctcactctgtctcacatagaagttttaaatattttccatgtaggcacattttatctttctctttactgatgaccagctagaacaattgatctccttgtcagctggacacatcaatatattggaaaacatattgctttcctttctcatttattcccaagatatcaatattgatatcttgatatcaatatttcaacattaaatatgtttcaaattttaaaagtccttgtctttataaattgagtctctttaaaacattaagagtatctctaaattctaaagtcccttaattatgttttcccaataatcaaaaataagttacatatttcttatttcaaaaagacaagcctgtgcacaattcaaattaaagcaaaactaaaattgaaaagtgtaaagctctgtgtcatgcttcttgactcatgattttctggacctcaaagggcttaggcagatccacttctctgaaatggaggcttttttcatcaccaaccagaagttttcttttcagtaatgttggtctcttcttaattaaggccaattctttatcttctggtgagcagaagtgtatattcttagtctaacttattgagcatcacagagagagtctttaagaaattctcaactccctcttaaacttcagggcaagtcaccattatctgcactatctctagcatcttctaaattcccaaaatagctcagcatagttttctatcacaaagttccacaccttccacaatagcttcaactccagaacagctcaggtctatcacagaaatagcccattactgatactaatttatggtttagaagggctttctgttgttgtaatgaaaaagcataataaaaaatgatttggggacaaaaagatttatttcagtttactattccacatcagactatgttgtcaaagaaagtcagggcagaaactcaaggctgagacgtaacagcagtaactaaaacagaaggaaattgctgacttttaatgataatttaatctttttccatttgaggttttattttagatttttttaaaatcctttgaaatcagaacattactttgaaaaacacttgacaatacaaaagtaaaagaaaaaaaaaaaaagaatgagctgagaattgtgatccttgccatcaattgggatgcttaattccagcactcaggaggcagagtcaggtggatctctatgagtacaaggacaagctagtctgcagagtgaattccagggttacatagagactccatctcaaaaaacaagcaaagaaaaaccaaatgctatcgaaaaagacaaaaacattataaatcagacacatatttgtgtgtgtgtgtgtgtgtgtgtgtgtgtgtgtgtgtgtgtgaatcactttcaaatgatgagttttcttagtataccttgtagagtaagttaatagcctgatatcaactgatgaatcttagacaactatatcagtgtttttcaaatatgatgtgtattttccaagtgcatgtttctttcatgtgatgaatgtaaagctggactgatgcaaactgatttatttttcagagtttctaattatgatatcttctggtatactcacaacctcttctttgtcttctacatgctgctgctgttgcatgtttcagggtaagaaaaactgtctgaactaccatctacattctcatgtcacacatgactaaagggaggcatttgtgggaagtgtggttctctgcatgaggcagccttttgttagctgcccagggctcacaaggaatacctttgcttccatcattatcctatctacaggaactgatagccgggtctcagggtgacattgtagtttcatcactgtgttgtagtctaggtattttttcaacaatcataaatagaattaattaggaatatgagtggcatggtcccatttaccccacctcaagtttctctagggaaaaagaatttatagaaacagacccattgtcctttcttcagattattttgtatagtagttgtcaaggtattagacgaattatataaattatgtacttattcccatgaacatgtcaaatttccctcctctccctggttttggtaaccattagtaatgacagggatattaaccagctttgttccaattgggctggtagttttctctggtaacccagtatgaacacagaaaagtaaggcatcagaaacttggccactcataataatcatgggccctggctagccattcctgctcataagtgagaatgcattgatagatggaactgggcactgcacatttcccgtgctggaggtaaattctgtggagccttgagctacaacaaaagcctgggtactgtgaatttgctctgcattttcttctggagagcagctatgtcgccagcacaccatgtgttcttttttaaatggctagtttctagtttgtagttcttacttaaatggctagtatgcaagttcagaactttggtcattgattagatattgaatcagcagattctattcagggtatcagtaatttacaataaaattatccactgcttgccacaggccaaatatgaactcaacttgtttcaaatatttttttatgtgaaatgaccaggacattatgaagataatattttgaaaattacaagtgagactctaaagttgagaaagattcagcaacttggcaaagtttacttaatataaacttgattcagacataggcattttaaaatgtccttattattgctaggtcacacacacacaaacatttttgagagcttcttgggatttgacttgctattgtaatattctgtaaagtttatctggcctgactcaggagtataacccacttgtcactatcttcctttgtctctgtccccacttctttcctttctattagaaaagagagacatgtcctcacttactagcataacaaagtattcattttgcctttatgcgttattaaatcagaactctggaaaaaaagttcctttgcaatttaaaactgtagcatagttttattcttttttcttttttctcccttagactggcattgaactctcagaggtccactgcctctacctccctagtgctgaaattaaagacccttgccacacctggctaacattagttactttagaggaggatgatattaagatttttttcccattttttcttaagaaacagagctgtttaaacttagctctcttttgcagaacaaatatgataggcagatggtaattttaatttatatacataaccaacaaaatagctactaaagaattaaatatattaatctattaatatattgatttattttataacttaatttataatgaaatgaaagcaattactataatactgaagtaaatgttattgcatatgttcacagtgaataagcattatatattacatagttttttttttccattgacctttttttgaagatttatttatttactttatgtatgtgagaacactgttggactcttcagacacaccagaaaagggcatcggatcccattacagatggttatgaaccaccatgtggtttcaggcaattgaactcaaggcctctggaagagcagtcagtgctcttaaccactaagcaatctccctaaccccagactttattttttactaaaatatcatagactgtgtttctgagaagaagaaattgactactggtaaattttggaacttttcatgtttattttattcttttttaattaacaattgtatgtatgtagttaagtcattctaaattttcttttatgccattattggaaatcatacaaacctttattcttgaaactcctacataatgtcatgctccagccttttgttaataagatgggtatggagtcattcgaagcaaaattcaggcatgcatgctaacatttttacttaatagaattctgtaggcttcatgtgaacaatctctccttgctgggtacctattcccctgcccatcagtgttttgaatacttaagggagagaggagcaatatagtgtaggatcacagtctcctgggatataattgatttgaggtaaaaaaaaaatcaatagagagctgtagatgatatcttcaaatacaaacatcatttatttacaggaattctagccattcagggaatagatgaatccacattgaatagaaactttagaaaatatttggcttcaaagatgaggtgattcaatttcttttggctgacttttatgcttacataaaatttacaggaaaaaggctgattacttcatgtgatttttgtaaggttttgtttagccagagaattttcaaatatattttgtatagctcctttttgctcatatcatataacattcatatttaaattttcactgcatatttaaattactgataataatagtttatgtttatgagtaatgatatgagtcttgatacatgtatacattctcagttgattagattaggttttccagactccatcatatatacattcacttcaaatgtatgtttggcttgaatccctgtatctttagggagtacatgcctaattacaaagatactcattctgatgtggcaaaaccttaataaccacacagtttcttcttttaatatcacaagtttgtttcattacagttttacccagagatttaaaagtctatgattcgatacttcatccctattatattcccatttatatcttatgtggtaatttttaaaacacatcatcattttattttttctcattgaacatatcatttaatattgcctgaatgcttatcttcttcaatgtgtgcgtatgcttgtgtgtgtgtgtgtgtgtgtgtgtgtgtgtgtatgtgtgtgtattgggaattatattccccgggcttttagcatttgccatgctaagtgagtactctctcactgagctagattagtccactaatatgtattttactgagtgttcccagcaagcctacggttgcttcttattcctatcatggcttgccagagaatatagtggcacaacacagggccagtgagttggttcaatgggtaaaggctcaagttaaccagtctgacatcttcagtttgagctccagaattcacattgtggaagaaaactactaaatcttgccagttgtcctctaatctcctcataatatatgtatgtgcatgcatatatgtatgtgtacatgggcacacaaacgcatacacacaaataaaatataggaaggaaggaaagaaggaaggaagaaggaaagaaagtaacaaagaaagaaacaaagaaagaaacaaagaaacaaagaatgaattcaggaattaaaatatagtaagataagaagcaatcggaagccattgtaaagacttctcatttttaagcttttgtgtggctgtatttacagagagattgaaaaacaaacagctttaggacttgacaggtatgtaaaaattgttttcacataagcaacaatcatttgatgcctggtattttcatttactatctctccatggaccatgaagtctgtttaatctagtcttgtcttgatcaaagattatccctgtgtttttcttttaagcttgaagatgcatagcaaaattactttcacagtgtttattgaactgaaaatttgtaagttagtgcatgaatgcctaacagaagttaagcttagcctattcaaaacacatcaagaaatttgaatctgttttcttctacctcacagacatagcatttgtttggaaaactctatcctttagtacagaatttaggatattttatttcttctgaaatagatcacacaaatactttgtataaatgctataaaaagtcagcaagaaaaaaggaataactgcttctctttacccattccatcttttgactcggtctcttttccatcttcttgtttttatccaatttaaatttagtggtttgttgaagtatcagacaaatgtagacactcaccctcctggctgcattagtcttaaccagacatcatcccagaatatgtccataccagactacgtctcagaacattttcatggatctttgcctcgagggttttcaaaattagaagatcgttaccagaaaacacttgtgaagatttgcctggaagaacccaagttccaagctcatttcccacaggtcagattaattctgtgtttgagatctgccaagtctgtggtttcatgtgactgtctgacattgcattcaaatatgtctctgaatctgtgttttcaggtacaagaggttatttcaggatgtttagacagcagagaactattttcttaatgtgtgtgtgtgtgtgtgtgtgtgtgtgtgtgtgtgtgtgtgtgtgtgtgtgtgtgacaggtatctaatactccaagacaaaagacatatatagaaaaatgtctaattaaacagttttaatgtagtatgctcttcctagtgtttgctttcagagagacaacaaatatatattctaaagctataaagacatgcagtttaaatttaacaaactgtaaacaaacaaaccctactcattgttgcaatatactattacaacatattatatataataaatagtgatgttaatttgttgaatgtttactataattttcttggcactatgccgaattgctctgtatgcagcatttcctttagtatccacaattaacctttgaaacagttactcaattatctgatgaaaacattgagcttaaacaattatcctgaccaaagtctataaacaactggtggaagaggaaatgtgtagacataggtctttaactctaatcatgaccttggaaagttcttcaactactccacaaatactttagtgatatccaccccaactctgcccttgtctgaggtaactgccaacatctaactgaagcccactattttgcatatgaaatagagaaaaggaaattctatttcaaagagagaagacagagaagtatcaatgaatttttagatgactttggagtcagctggtcagctttccaagtgtcatataatgatgaatattatatatggtaagtatggcaagttccattttctttatgtgggtcttaatcatctaggagtcactgacttacagatgcaacatcacttcattgtagaacttatcccaccctgcatatcttcagagtgtcacgttcattgtcacagtctacagagcaggagctaactgcattcattgagtgagcaatgtctgataaaactgtgtgaatgagttttcttcgaagggccattaaaataaaactgaaggtcgcatggattagcagacacctctaagcctatataatcaaaaagtggaggcagtaggatatcaagtccaaaagaaagttgcactaacacaatgaaactctgtctcagtaaacaagaaagcaaacatctttataaatacattacaattcagttgacagctttgaagagaaggagaggctatagtgggcagttgtaggggaaagatggttctcataggcatcaaaactgtcatttctcataaaagtgtaattttggcctattatattatgtaaaacgtgtaatacaaatgtgctcggtgcattctattttcaaaactagaaatgcatttacatgagacatcatgtttataaaactaaaatgtgtctatacatcagtgttatattcattaactattgagggcattatgtttttactaaaccttgggattgttttatttttctaaatcatcatcagataaatatgatgctttaacttctctttactatacagaaagttctggtatgtccctgtcacgaacttcaatgtacagatggttgtatgaaggaatgtttacatagtaatggtagtactcaataggatatagatttgagattagggttctatattactttttctctcacaatttcattgctgagagctttagccatattttactcatgcttactaatatcttactgtttatgatataaattgaaatattgctcagttgttaattcagtcatacattacatgaagcaaaattgtgaaaaatttcctttagacctggatttggatttctggacctttgtgcctttattgtgcggagagactttaccgatgcatcaggagcaacaaacctgtcaccatcatctcagtcatcaatcatccctctgatgtaatggaactccgtatgatcaaagaaaactttaaagcaagacctggccaggtgagccagtggttagtgcctttgcaagtatcttttatccttaggaaatttttaaaagttagtagacagatttattggaatagttgtatttcttttttgatcatttaaaacattatctgtttgttgcttttttagtatattattctccattgccccagtgtatcagcattagaaaaccacccatttactctcacaatggtaagacatatttcttgaattttaaaaaaattttagattgcagaacatctttgtctacgcgtatatatgtgtgcacatgggcatatgtatttgtttatctgtttgtatatacatatttgtgcacacacatatgtgtgcctataaagacacacatgtctgaatatatgtgtctatgtgattcacatgtgtatatttgtgtatgtgttttatgtcattctcaaaattattagatgatcatagtttcttcatgttttagttagctttttttttcaaagaaatatagttttctgttcagagactttgtaagtattggttttccatgattttctggttcctaactattcactaaacaatgtgcttatttaaaatttattaaagcttattgctttaaaacatagaaaactcttagtttcatttttccatacatttgtaatgggcttgggaatggtagtcagatggtagagcttttttttcctagaatgcatgagatcctgtcagggtccatcctgaaaaccctgtacactgtgcgtgctgctgcatgtctataatccaagtactcccgaggtagaggcaggagactccagtgttcaaagtcatccatggcagcatagtaagtttaaggacaatgtaaatggcttgggattctgtatctcaaaagagaaaataaacaaaaaaaaaagaattttgtggttttctgtatataaattatgtgtggaaataaaatatggccagttttcattaaagagttggaataagggaggaaagatactatggatgatgtagaagcattaaaaatacagatagtagtaagagaaggtgaagcacaatttagctggtaacttcatatatgcagaaaacaaagttggataaatgaaattagacaaataatagagatgtctgtatacaatcacaaattatgcttaaacctgcattagtataataataaaatatttttacccaatatatgctaaaatttacatcatatacacatagcaaattactaaatatttaaaaatagattttattccagcgtatcatgtatctacagtgccctcccttttccttcatcctttcctcctgaactctttcctgacatatatagatgattttatgttaggggcaaaatcgatcatccaaaattgagagaaatatccaatatgcctcttcctgaatcagagtgcttaatctgctgacctcaagttggtcatctcaatgtgtgtataggtgaggcattggattgtatagttgagtatacagtgagcatgtgatctcatttgctcccagagcaggaggtttgtaagcctgtttgagcttttatcacttatatttcacatgattcaaaaacgaaagataaaatagaaggatttttagtttttcattttcagatcttcttccccataattgggtaattccagatattttatcatctatttcagcatatacaaattcctggggtttgcttgtttgatcaaatggttctttcactacatcacttccttcaagactataccacgaacagtttctcattcttttcttaattaaaaaaaaataattttattagttatttactttatttatatttcaaatgttgtcccctttcctggtttctcctatgaaaaccccctatcccctcccgcctccccctgttcaccaacctacccatacctgctttctggtcctgacattcccctacacaagggcatagagcctttcacaggaccaagggcctctcctcccatcgataacctattagaccatcctctcctacatatgcagctggagcaatgagtctcaacatgtgtattctttggttggtgatttagtccgtgggaactctaggggtgctggttatttcctcctatggggctgctaaccccttcatctccttgggtcctttctctagctccctcattggggaccctgtgctcagtccaatgattggctgtgaggatccacctctgtatttgtcaggcactggtggagcctctctggagacagctataccaggattctgtcagtaagcacttgttcgcatccacaaaagtgtctgggtttggtgattgtatattttgggatggagccacaggtggggcagtctctggatgatcattcctttagcctctgctctgaactttgtctctgtaactcctttcatgggtattttgtctccccttccaagaaggctcaaggtatccacactttggtcttccttcttcttgagtttcatatggtttgcaaattgtatattgggtattctgagtgtctgggctaatatccacttatcagtgagtgcataccacatgtgttcttttgtgattggcttacctcactcagggtagtattttctagttccatccatttgcctaagaatttcataaattcattgtttttaatagctgagtagtccctcattgtttaaatgtaccacattcttttcaattactatataatgttccacagttaggaaatactgtttatttgatatttgcattaaggactgatgtttaggtctcattcatgtttctgataaagaataactaacacaaccttgatgtatatacaaaaaataaaatttaccacattagggagacagaaagaacaaccaataatttaaatgtttatgtttagggtttgggtttgtgaagtgacttttggattacatgtactagatttaaagttcacagccattgagcgtattattttatcttttgggacatttggctttcagtataatattatgatttagtcagttctgaataatagatttggaggagttaagcaaactgcaagtacagcataaaaaaataatcatgaaagtactgaaagtatctggtgtgtgaataaaaccattatgattttaattttcagttcaagtttatgtctcaaaatcaccagaacattgacagtgaagctaaataattctatacataaagaataaaggaaccaacaagcttgtatcaatttgttagaataaaatcagaggccatatattcaaaagggttttctgaagaaacaaatgacacttttctctttatttacttcaaattttgtattctgtctatatgagtgaatcttgtttaataatcatcaaagaaaagtcgtttagcatctagtaagataatgatctatgtttagctctgtcagaaacgatggcagccctggcacagcagagtatggatatacagtttctttgtctgtagtgatggtgagttattctgaatactctttcatctgctgctgtatgggctttgacttctgtgaaagggaagcatttgtcatgaggaatagtgaaagctcagctactcacatggagtgtatcctaggagcttttagaacacagttctcatgagaagtcaggttgctgtggcatgcccattagtcctctagagtttctcatgtttcaccaggtaccagaaatgtacctgaatatcaggtgtttaactgtaacaaaaataaaattgcatctaaatcatatttgcttctgacagttttaagacatattttcatatctcagatttcataattcataaacatgaagctgttatcagaaaaaagtagaaggtgaaaaaggagaaaatatacaagtagctttatagaccttaggagagcagacctactgtttacaatcattataaatttccttcagaatctctgtttgagaatttatttttaaatttctttcatagagatagtattaaacagaacatagattgtaagaaatgaagcaaattattgaacgccaactacaaagcttagagggtacttttttcataaaaatattttccaacatgttccaaatggagaaaatggcctaacataccagtaagcatcaactggcttaggaaaaacaaacaaacaaaaaaaaaaaacctatctctctgttaaaatttatattttactaaaaattttttatgtttttctcagaaataatgacaagagtttccccctgacatcgagaagcttttaggtcaaatgtctcacttctctacggctgcacatcagaattcataaacctgaagggctttcagcccgcacaggaccttgaatcagctgcattttaaatctcagctcagatcagcacattccactgagatacctcagcattatctatttgttatattgaaacccaaatatattcttgaagcctctgctctttaatcacctagtcttgtttctatactttgggagcactaaatttggggacgtttatgctataatttcattgacatagatttttctatgcctgtagttttaatctcagccctatggatacttatgtttggtttcatgatagagctcagaattctgggaaattgtgattagacccttttatttattgcattcctttactgatatttgaatgcattaattttttttactttgatcttcatccttcacattccttctgttacttagttgagactgctgtacattttctttgtattttaacttaattcctttgatatttcactgccataatctattttcattttcccccaatttaattctattaatgaatttctctgatatgatattaactctctcatatattttgacaattttctcatctgcccttctgacttactaatctgtgttgttggctttctagtccaggtctactgttgattgcatttcttcttgtctctgcttatttcaattattttttgtggccaatgaaaactgtcatgagtaaattactgcatttttgtcattgtagcatctttgaattcataaatgatatggtatgatcttttataggaggtgtgtggccttttttatgtcatttggtgtccttatgttgccatttatgtatctattgtttggatatctcttccatttggttttgggcatcttctcaatgatcagcatagtcttttgtctaaaaatattaatttttgtgtgtttgtgtgtgtgtgtaacctctgtgtgggtattaacatatgtgtggaacagcctgtaaagatcagatgattttgagccacctcatgttggtgctgggtactgaacactggtccactgccaataaatataacaagggctctttactagaaaccatcttcacagcatagcagcctcctctggagagctcaatctctagtaccattaagaaagggaagaagaaaaaacagttgttaacagcaactcaaatcaagcagtatgatgaaacatacttaaagttaattagatctcactaaactatagctgaatctattatctatagaacaacaacaaaaaggcaaaaattatgtacagcatgctatgcaagtcaaataatttagggtgaatggactggtaaccaaaggaactgggattgaagaaaatgtagaagaaatatggttaaataaaggaaaaacagaagatttggaaaggttattgaagagaagtcatataaagagatataacataaaattacacaataatgaaagaatttgtaaagataattatataaatggaaaaagaaaaaaaatgggaggaaggctggagtgataggtcagtggtcagagcactgtctgctattccagaggtctttagttcaattctcacgtgattgatcacaatcatctataatgggatctaaatccctcttctgttatgtacagacaaagcacgtgtatgtataaaataaatattgtgttttataaaaaggaaaaaaagcataagtctttgaaaattaagaccaagagggagattgcatgacgtcgaattgttgggaattgtactcaggacagcatctcgtaagacttgacaaacaagaaggcagccagaactttaatgatacaggagaataatagaagagatctcaaaatggctgacaagagctcttcagatgaggtgttatttcacagttgtcctgtcttgatgtcaaagaccctaagctttttatctcccagttgagttgtctttgaattttagatgtctccaggacagggaacttggattcacatgaagaagttttgagtgagtatcaggaaagtcccagtgggaagacagtcataggtagccatctctactgctgggagcctttttgagtgttttgattgtaaattttgaggagaattggaaggaaagtaaaggataaattgtcagtcacaaattttatctaaaagcactatttgtttgtgcaaagtgattcccttttagaacctgaaattaaacatataaatccaacttgctaatatatttaaggttcaacatttcctgtccaagttttttttttttaatttgtttgtttattatatatatgagttcactgtagttgtcttcatgcacaccagatgagggcatcagatcccatcccaggttgtgagccaccacgtggttgctgggaattgaacacaggacctctggaagagcagtcaatgctcttaactgctgagccatctctccagcccatcctgtcctagttttatttgaagaaccaaaaatttaaattgttgaagggacaaaagtcattaaacagtgtaactgataacaaaagctagaactagaaccaaattttcatgataattttttcttttaggcatttattgacttaataagtaaatagaattttgcgctgtgttcctatgctactcggtgtttcccagctgtgttctataatgaacaaatgtttagatttttttttggcgtggggtgggggaggagacacacatcatgctgtttgttttctaatttcaaaaacaaaataaaagtgagttttaaaaggccttcgcaaaaggacttaagaaaggataagatgtacttattacaaaactcagcatctcttaattttttgctgtggtacatatttttatcttccttttcataaattatcaattatagaacaaatacagtcttccttttcagtattaactcattgaagcctatgcacatacctccatgtccttctagtgttatttttattcagaaataaacatgcatttctgacatctgtagtttcagctgtatgattcatcatttcgaaatatgaaaaacccaatttcgtatttttccatgagtcagaacctagtggttctcctgtttattttctgcacttttcacatagcgtgcctgctgttccattatttttctgtttcacgttcttttctttttttttctagatttaaaagaaaatgaaaacaagacaatatgtttcagttgtcatttattaaattttatgtcattaaatgtaactagtaattctttgtcaactactttgatttctgctcttaatcccttctagttagcacttaaaacttgccttactcttgtttttctcagatcttttgcgctagaagcttggaggagaaggtagcttgccaggcacaatctgtcattatgtattcaaggcacagtgttgaaaaccacagacagtgattagtatccatagaacccaacaaaatgtttgaggtttttgagaattaaacatcacctaactcctgtactttggctgtcttccaggagaaaagcaatgtttcctcagagactaatgatagcttctgtgataaatgtgagctaaataaagcagcatactcagaacaaatagactggttaatattaatttgatttattccatcaatagtttttgatatttctctcacctcctggtttcaaggagaaaatgaagacactcctttcctgactcgtcccttctggctactgctgcaattcatcagacttttctctctttctctgttgcttacccttggatttggccacagctgcatgccatgaagatacttccaagatgaaccatgccttcttactggtaaatgcactgagcatttcccattcattcatggtctttacaaatcagcacctttccatcctgctgtcattttttattgaaacactttttacaattttcgatttgtttccaggacatccatgtttatggtgacttttgattcagtcttgtttcatttatttccctctacattcccatgagctctgaatggcaaaaggcactattatcagtcgactaaccttctgttactttacagctgtctatatttctctgatggcccacccgtgtttccagatcggaaatcccagttcatatcaggatgtgtttcccagagatttaaggcactgtccttttccatgtgtgactctggttactacattagcagaagcagggagagcagctaggtgtctgtcccatccagtgtaggtatgatgatagctttgataatggtgatgacactggacagaagtgtcagctcctaattctattttgaagttttgatggtcaagacttgtttttctcctgcaattggattgtaaatgtgaagaattcaaggttcatacctacgtttctgccctaaagagttacagttttattaactaaaagaggaaagactggattaggatccaggttgtgaaactcagtttaaatcatatgatttggacataacatactatgcagcatgcttgcattttttatccaattaataagtgatagcctactctttgctttcaatgggccatagttccagacccaaaagacctgtgtgttttgcttctgttttactttgggtttctagagtgctagttctcatattttttgtcagactaaagaaaatcttgggagagagaaactgatatacaactgatatacaaatatagatagacatttttgaactccagatctgatcttcctgactctgagaggtgaggttctccagtgttctggtgacattggtttccatgttgctcccttcaggagaattttagtttcaaatatttccctattcatttccaccatctcactacattctgccttttaaaaacttgtcaaaatattttaacgttaattatttatttatttatacttatttacatgagcatgctctggctggtccgaggcccatggcaaatattttccaattgtgcaaattacttgctgtttttttttcagcattaacatttgtatattttttgtaaccttaagctggtcaatttagtgtttgttgtcattttatattttttaaattatttattttattttagatgtttgagtgttttgcctagatgaggagtgcttggtgcccataaagatcagaagggtgcatcatttccataaaaatggagttacagatggttgtgagctaccacgtaggtacagggaatggatccacatcctctgaatgagcaggaagggattttaaacactagaccatctctccaggccttatttgttagtataaggaacaaaaaataaaatcatacttctatgttatcaaaagtacatttacacattttgtttttaataatttgagtataaatttttcaaatatacacatatgcactattttattctatttatgttcaagtagacagtatcattttatatgtttaaaaatatttagctcaccaagttgcatttatgtgagggactctgtgctcctaactcactgtcctttctcatgcttgttgaatatttctcatttgtgaaattatatgttctcctatcacagtatctagaatattttgaaactccaataaatttgtgtttagaagatgaagaagccatggaagagagacatacatttgaagtccatatttttctctcaggttcattctttaatattttattcaagtgatactccattcaactaatatttttccaccttccaccctgtatgtataatatattatagatttttagaatatgtaacgatacttttgaactacatcttgttttctaaacattttaaacatattcatatggacaaggtatacaaactatcacagactgtaaaatgaaatgggtatacaaaagctacacaaatcttttaggttcagagaagtgaagaattttttgacaaagaaattcaggctcttatgaaatgcaggctttgagataagtctcaaagagttgccaagagttaacagctgaatggaagagaacttgttataaatgaccagactgtaagtaaattgtgtttagggatgtattaaatgttgacaagttcttgaattaatatagatgaaattgaaccatacagaatagagatggaacaactaattttgaccttggactgtaagaaagagagaatttgcatgctattgagtcatttttttattactgtgacaggataccaaagaagttaacttaagcaaagagtttattttggctcataataccagaggtcgtagaatgtataaaagggagatgtgagcacagagcatagcctttagtattaggcctcccgtgctctaacttctttgacttggcctgtgtgcctgtaactcatgcagttttacagtcatcagtgaattaaccaattgattcagttacttccctccttactcaattatgtcagcagcatcactagcttggaatcaagacttcaatcaataagtaggtgcttttccatatagcaccaactaatatgagattgctatgattcgacagtttcctttggaaacttatttgaaagggcttgaaagttgattgaacctggcagcaggactaatatgtgatattgtgatatttggtcctattctggaaagaatttggttccatgtacagatatatgagaatcaaaagaatataatttgagacataaggtaataacaatttcagctaaattaaatttagagtgaactggctagaagacagtaaaaaaaagtgagagattggagctagaaaataaaaaagggccgcagagacagatcacaaaatgatttaataacatccttttgatcattttgtgatctgcgatcatttttctgacttaagaaattaggttacaaataactttagatgatgaacatagatataaatttcaattattttgtttatttaatctcatgttttaaaaacaaaaatatattttcttatatttttgatggttaataggtacatataaaatgaaatcatattcctaagtagatatattttaatattttgtctcactgatatgtaagcattagtaaatttttcatacttaaaatcgaatgcctatcaaataaatatgaacaatgcttttgtagcatctactgatatgatgatatgggtttttttctctccatttgtttatatggtgtattatattgattgactttcatatgttgggccattccagctttcctaggatgaagcctaattgatcatggtagataatatttttgatgcattcttaaatttggcttgtgagtattttgttgagtatttttgcatcaatattcagataattggtctaaaattttccttgttgagacttttgtgatttagagattaaggtgactgaggcttcatagagtaagtttggcaatgttcctgctgtttctattttatggaatagtatgaggagtgtttatgttagctcttctttgaaaggcctggtagaattctctgctaaaaccatctggccttgggccttatttttgattgggagactgttaataactgcttctatttccttaggggttatagatctatttaaattgtttacttgatcttgacttaacgttgctagttggtttctatcaagaaaattgtccatttcttttacatttttcaattttgtggcatttaggtttttaagttaagcctggtgatgctttgggtttcctcagagtctgttgttatggccctcttttcatttctgattttattaatctggatactgtctttataccttttagttaattttgcagagggtttctctatcttgttgattttctcaaagtactaactcttggttttgtttattctttgtgttgttctctttgtttctatgtcattgatttcagccctcagttctattatttctgttttgatatttgcttctttttgttctggatctttcaggtatactgttaagttgttaatatgacgatctctccaatttctttatgaaggttctcagtgctatgaactttccttctagtattgctttcattatgttccatacgtattggtatgctatgcattcatctgcactgaactctaggaagcctttaatttcttctttatttctgcctttacccaaaagtcattcagtaagtagttgttcatgtttcatgggtttgtatgctgtctgttgtttctattgttgaactccatctttaatccatagtggtctgataagatacatggggttatttcagttttcttgtatctgttgagacttgctttccactgtttatatggtcaattttgaacaaggtttcctgagacactgagaagaaggtatattttttgtgtttgggtgaaatgttctgttgatatctgttaggtccatttgattcataacatctgttagtttcattattcctttgtttagttgctgtctgaatgacctgtccattggtaagagtggcatgttgaagtcccccgctattaatgtctggggttccatttgtgatttaatctttagtaatgtttcttttatagatgtgtgtacttttgcacttgaggcatagatattaagaattgagatgtcatcttggtgtattttttccttttatgagtatgaagtgtccttctccatcttttttgattgattttgcttgaatgtctatttagaaattagaacttagaacagctcctttaccttatttgtgtctgcttggaaaatctttttccagccacttactctgaggtgatatttatctttgttgctgaatttctcttctagtatcttctgtaagctttgatttgtgggtagatattgtttaaatttggtattttcttgaaatatcttgttttctccatctatggtgattggaagtttggctgggtatcataatttgagttttcttagagtctgtgagacatctgccaggctcttctgtcctttaacatttcttttgagaaggtatgagtaattctgataggtctacctttatatgttacttggccttttcctcttgcagcttttaatattatttctttgttctgtaaacttaatgtttgaatattgtgtggtaggaggattttcttttcttgtccaatctattggctatgctataagctttttgaatatgtataaccatcactttctttatatttgggaaattttcttctatgattttgttgaaaatattttctgggtatttgagctgagaatcttctattattcctcttcctcttaggtatggtactttcatattgccatagatttcctagatattttgtgtcaggaacattttagatataacattttctttgactgatgtatcactttcttctatcctatcttctaagcctgagtctgagatttttttccttctgacttttgtattctgttgatgatgcttgtgtctgtaattcctgttctctttcctaggtatttcattctgagtattccctcagcttctgttttctttattacatctatttccattttcagatgttgaacatttttattaatttccttcacctgtttggtttcctgtatttatgtaaggggtgaatttattttctttttaaaggcccctatcatcttcataaagttagattaaagtcattttcttttgcttctgctctgttaggatatccagggcttcttgccataggatagctggcctctggttgttcaaaattgccttggctcctgttaattatgtccttctgctggcctttagccatcttgttgttcctagtgctaatgagcctccaggaaatcaggcagagttttgggtcagaaaatagtgtacaggtttacagggcagtttgctaccctgaaggggacctggcaagcaaggggcctggggcaggggtcctacttggttgtcctcactactggtaggtgtgtaggaatgcaggcagaatactgtgggacagcaaaaccatgccaaggacttggtaaggaattatgggtctgagaccctggagacttggtgggcacacacctaaaacttaggctactccctgctctccctgccagattcctggcctgaaactatgccacacgctgcacataaagaaacatgaggtaaggtcacaaaggctcaggacaaagttctccatgctaatgaggtacctagagtccctggagccaataacaatctcttcccagacattcctacctgcaaaggtattttttaatcttgagtcccctgagaggttgactgtgcatccattttccaccataaatagtcaataaacagtttagaagcatagaccgttacatctaccatcaccatagggaacatgtagaaggttttcactgacagaactacaactcagttctctggtagaaggcctctatgttcccatccaaccaccaccaaactaaggacaatcacagctaaaataagccaagctcttctttccaccagccaagcctagatactagtctccagactctattcctgacttcattctctgctctttcataactcttagcagcacctggatgtcctagagtctgagaatcccaggaccccctaaactcttccagctttcccacatctcagactgtgctttcccatccctgagcagtgtcttggtgcttccctgaagcccagcacccacccggaggctgtgtgaaataagcacagtcaaactcacagcatttcaccttcagattggccttgccctgaggcaggtggactgcggacccaacagaacagtgggacagaaaatggagattagggggcagggtgaaactcactactgctgggtgtgctccacgggagctgtccctggtacctgcaggcctgacagaattcaggccagaaaatcctcaacagaaatcttcacaggttttatagttacctacaatactctattaacttttatttgcatattttatggtttatatgcatatttatgggtctttagagaaactcaaatgccctactgatcaaatggcattgctttatctatcatatacatttacaccctgctctttctcattagttgttgatctgggggcttgcaatagaataaaggttgtaatcacatcatattcttctaatgtataacaattaatctgaattgatgctagtatttatttttttcagtgtcctactgaaaccaaagcaacatttggtgtccactttaaagtagtaggagactggacaggtatgtaccatgaaatagctttaaattctttgaaaagaatgtagtataacaaaatgtatcaacacaattaactactcatttgtatggaaagatatatatgttcagaagtttttctttgtttatttagttttattgcctaatttttcttataagatttatgaaatcagaataataagagtaccagtaattattactaatgaattatttatggggtttatatcataggcctcttattgtcagttctgttggtaaaaggtaggaatacttaaatctatttctagaaaacatgactttaaagttcatggtgttattgagttgcaaaataatctacatttagttgagtaatactgttaagaaagatgaagtgcttgtgtcaagcttggggacccaagtttgagattccgaaactgcattcaggaaggaaagaatcaactttctcaagctgtcctctcaattccacacaaatttcttaactggtttacacacacacacacacacacacacacacacacacacacacaccatgtaaaggtttaaataaccactttggattgagaacaagcaactctcaagtttgaatgaacttgatgtatatctataacaccaaaacatctttagaatagaagttacttttaatatcaggtctttaggtgttactttagacatctagttaataaaagctttatagtctttgagagatgcattatattgaatcccaaacaaatatgtcaagtatgatttattattatagtctctggatccaacacaacgggtaagaaatgcacacttagttaatattggcatgttggttctttagagtgctgtcaaaagaaaagattgaaagtataagaaagaacacaaacactttaaaatacatttacaattcaataattagcaagagtcttctttatagtaatttcagtgtagtctagagttagactaagtaaatccatggagaagatagaaattttcaaatttagacattgagtgaatgtatgaagatgtaagaaaaagtgtaaaactaacaaggaaatctggatggacctggagggcatcatccagagtgaggtaacccaatcacaaaagaactcacacaatatgtactcactgataagtggatattagcccagaaacttagaatacccaagagataagatacaatttgctaaacacatgaaactcaagaagaatgaagaccaaagtgtggacactttgccccttcttagaattgggaacaaaacacccatggaaggagttacagagacacagtttggagctgagacgaaaggatggaccatctagagactgccatatctggggatccatcccataatcagcctccaaacgctgacaccattgcatacactagcaagattttgttgaaaggacccagatatagctgtctcttgtgagactatgccaggtcctagcaaatacagaagtggatgctcacagtcagctattggatggatcacagggcccccaatggaggagctagagaaagtaaccaaggagctaaagggatctgcaaccctataggtggaacaacaatatgaactacccagtaccccccagagctcgtgtctctagctgcatatgtatcagaagatggtctagtcggccatcagtggaaagagaggcccattggtcgtgcaaactttatctgcctcagttcaggggaatgccagggccaagaagtgggagtgggtgggtgggggagtgggtgggggacttttgggatagcattggaaatgtaaatgaaataaatacctaataaaaaaagaaaatatctaataaaaaataaattaaaaaaaaaaaaggaaggcctaatggtctttgtctagggttgccattttgaagaatggttgacccccacatgcgggttgtttctgcatattaaacgccctttgtctttgcaaaccaaaaaaaaaaaaaaggaaatctatctcaaataagggaaagtaatgaataataatattcagcaatcaaatgaacaaaaagcaaagacacctaatgaatcaaaattaaagaaaacagtgtcagccaaatcaaagctaatttgttccagtaagaattttttggattcagcttagcaaaagattgggtgaaatcacactaatctggagatgttcgtgaacctttgaaggaagtgaacctctctagtgaacataccaacagtgagttgctatttcaatctattactagcaaatgaagacttgtatattcttagaaacagaggggaagcaatcagaggcttatgtactaaacctgagaaaaataactatgagcaaagttaagaaattagtactggaaggaagaaaatacttttaaaatcaaagaaagatagaattctggataaagatggaatattcaggaatgtagagtaaggttatttatataaggaggttatagtacatcataaaatgcatgatgcaaataaatattttgtatttaaaggcagtgaacatggaagttgaaatttgaaaaaatgggaaatatatgctatgtaccacttaatgggaacaaagcccaaatcagtttacaaagattgatttaaaaagattgagaagtaataaccttcttggagtcacaaaatataatcttaattagataatggttatcgttgcactaaaaaggcatcacagcagtccatctgtagatagattttcatgtatcatggaaaggttacttcttatgatatggcagaaagagttgaaaaaatgaatttgttttgacactgtctgggaaataaagaatggggagaaatcttttccagtaagaattttaatatagcagaaattaaattcagcaatgaattgtaattgatagaattctgtatataaaggaaaagaacaaaaatataatttaatccataagtgcaaggaaaagctttatgatagtttgtaactatctattgtgtatgatctttttcctctgagacctttgtgatcacaagtagctcattaaaaattaattacctcaatatttattttaattacctccacttgagcaggaaatatggtcaattttgcacccattgtaaattgtgctaaaatattggtagagatgcaagatcattctattcagagagttaaattctgtctaaaataatggaaatttccacataatagaggtaaacatgcatgtagaggagcccaaaataattgtgtcactcactgacataatatttcaagaggagatttagtttccaggaaacaacagagttacaattattgaaagaaaaatgagaacatcctcctctgagatcagaaatcactgagtttttctccaaaattaaaattatgagcagaatactatttctagaagtgccaaagaaaaacttaataagaatgtgaacattggaagcttttaaaaagtgatattgtatattcgtttgtgtgtacaggcatcagtgtgtgtgtgtgtgtgtgtgtgtgtgtgtgtgtgtgtgtgtgtgtattgtgtatttgtgtggtggtggtggtgttgtgtgtggctgtgtgtctatttgcatatattccatagtgtgcatgtcgaggtcataaggctacttttgagagtaagttcttaccttccacaatagctgaggatagaggtggtttgagatccaatcacttttacatgctaagcgatctctccagccccgttttggatttttaactgtgattttgttttagtgaagtatgttttaccatgggcaatgaacagtgcttgctgataggagcctgatatagctgtctcctgagaggcttatctagagcatgacaaacacggaagcggatgtttgtagccaacaattggactgagcacggggaccccaatggaggagttagagaaatgactgaaggaactgaaggagttttcaaccccacaggaagaacaataatattaaccaactagatacccagaattcccagggaataaaccaccaaccaaagagtacacatggagtgacccatggagtaccctcatagaaggaggggaaggggtgatgggataagggaattccaaaggggaaaccaggaaagggaatagcctttgaaatgtaaataaagaaaatatccaataaaagaaaaaaaaaagatttaggtatattccataccaattcattcaagagttacctacaatatacagtgtacaaagatgtaaatgaaatgactccatagttctggagactcacctagtttcattcttgtcagcattttccttaagaattgcatctcttgaatgcatgagtgatacattaaatatagaagactatgaaagatatgtttttgctccctctaacaatgataatagtaaagatagtcaaaataattgcattagaattttatttctcttctaaaattaatcatatttttgtttcaaagatatgattaagaatattaccttaactatactgtctaaaatatcttatctatgctagatatgattactgtggaataatttcactatttgcacatactctctatgtttagtagtttaaattgcagattattttaaagacttttttaaatttcacaactaaagtgttatatacgccttatcccaacacaattattctatatttttaatatgaaaatattcaacaataatcatagatagtcataaaatagagaaactattatacgtgtcatataatggatttttattgatccttggtgtcttagtcaggatttctcttcctgcacaacatcatgaccaagtagcaggttggggaggaaaggatttattcagcttacacttctatactgttgtaccaaaggaagtcaggactggaactcaagcagggcagaaaagcaggagctgatgcagaagccatgaaggggtattctttactggcctgcttcccctggcttgctcagtttgctttcttgtagaacccaagactaccagccagagatggtaccacccaaaagtggccttccttcccccccccccgccccccgtcccctcgtgatccctaattgagaaaatgtcttacagctgaatctcatggaggcatttccccaactgaagctcctttctctgtgataactccagcctgtgtcaagttgatacaaaactagccagtacacttggttatgacatttttgtatttctcattataatttgcagtaataattagatatagttaactgatagaatctaaactgaaaatgaaggacactgtgaattttcttttatagcactaatccaaactaaacacagtgtaagaaatattaaatgcaactttaatcaaagacctccacaaaatacttgattattatatctctgtatgtctatggcattctagaaagcatgcatacttcaggtaccatccagctgaattttcatgaaatgatgaagattgaatatgtactgtatatgttaaatactttttaaatttggagttttccttataagttgtgatattttcttaagagacatgataacactaaattatattaatttatggctacaacatatttagggaaactagataacttatatagtagaaatgactttgacttcctgttttactttttgttcaagtagtttttattaaatttatagaattgtggtaccatcaacaatgttcttattcacttatatttctttttaagcttcacacattgcatataatgaattatagttgtttctccttgttgctctctttcatccccatctctcccatgcaaacatttctttctggaaaggtatctgccaacattaaagtcttctttttgtgtgtggctgagcatggtagaggcttattagagcatgagcaactcatcagtgggctcaccactgaagaaagtggtattccctcccctagcagccattaactgctaatagatctttacggaaggatgggctttttagttactgcaaaattacaagtaaacctgaatgccaccagtgaatctcaatgcaaagggaatcggtaaaataaattggagagtgaattatttgtatattttaattttttttctgggtgtcagatgtccatttaatccatgtgcttgtaatgcaaatattaatctaagtttataataaaaatcattatctgctgcttccagaaaatattgccacagagaagattctctatgattgttcttgctatgaccattgaaatccttggatagccagaacatattttttaaaaacaattgattattttggctaataaatatttaccaaccatctactctaggctatagggggatgagatgttagtcttacaaacatgtcacagatatggttttcaagtctgtctgaatgatttttacttaggtcctaataggctctaccttgtagttttcaggttgtacttatttaaagggaatgactttacaaggaaggaagggaaacaattttgagaatcctaacctttttaggaaaatgataaaactctttggggaatggacttataccataatttctgtggttctttgatagtggttatatcctgccatatggttgattaattcagttatcctcagtttcatttgtgtccatcagactctgcagtagttaccaactgagcttgccaggatccatcaagaaaaaaagtatcactgtgtatggcagctttagccttttaagatgtgttagttaaacaagaggactttatacagaattgaaattgtgccagttggttttccatctctgcctcagttcttagactattggatacattgctggtgagcagcagtacctcgatagaaaccttgctttctgagcagtagtttttagcagtgtgtttcaatgactcagtgagtcatggtctaatcacgtgtggtatccaccaacttcctgtcctatttctttcgtatacaggacatgctttcatgtgacttcatcatttttattctacatttatttattatttattttctggtctactttatatgtaagtgtgttttatcacatgtgcattggagagcatgtgagggggtcagaggccaacttgcaggagtcagttttctttttctacaatcttgcttgctcaggttatcagcttgattggaacaggctcttttacatgctgagccagcttgccactctgctgtaatataattttctttctttcttttttagtatttactttgtttttgtttattgattttttatttaaaaaattcaggcatgaatattgtatttacataatttccaccctaaaatctccctttctatctcttcctgggtctttcttgactctatctattatatacatgtatttttgtagatatagatgtttttgcatttacatatacatggctttatgtatacatgtatgatttatgtgtatatgtgtttatttgtatacatagacatataccctaggacttcatttagtgctgttatttgattatgtacatttagggtgagtccttggtattggataactatgaggacctcttcctggagaaacctgaacataaacaaaacttttgagattaaggaggaaaaatgcagttcataggactcataatttggttttccatgattccatgagctacatcatttgacttagttctggacacagctaagtataataacccttcagtttacaaagtagttgtaatcctagaaatttgtttgtaaattaaagtaattcaaaacttttcattttttatagttatacatgattttttcaatttggatgtatatccaataatttcaacatattttctaaaaggatttcagagaattattgtatgatatgatattttgtacaacattgctgaatatctaatggtccccttccctccattttaatttcagtaatttctgataaccattttgagaaaaaaaaagttttagtaattacactaaacttaccctaggaagtggcactgtctcacatcttaaagagttcatagttaaagaagaactacaatggagatctgaactctgagacattcttacatgttatgttcagcaagggcaactaaaaagcactagccactagactagaagagagtgaagatcatttcatttacacatcacaggaagatgcttcaaaacatggttgaccagttgtaacagatgcttttaagaaatcacataaaatgaagattgaactagtaacttcagaagatttggtttttatagaatgcttgaaataaaagccacattgaagtagttttatgagaccgtaatttaaaaaccagacagacatcctgagagatgctagagttcatctcagttcaacctaagttggggagcgttccttctcagttatttatctaatgaaatcaagtaggacagcttcccatcattcacagtggggcatttattccacagaagttaacacgtgttatcacagttacatgaagccttccctataatttatatgctgagacttaattgccaatgtgatcactacaattggtaggcctgttgtaagagctgcagggagttaaatttgccccttttaagtcttaattcatgcctgcatagcagagagataccatcttggaaacaaactaagcaccaaatgttcaaacagactaagtacctcaatgttcaaatttctgtgagaaatacactttggtaatgatttagtaaccctgaaatattttaaacacatgttttaagagtgtatacgttggttttttttagacgtgtctcttgaacatttgccagaacacaacagcacatattttaaatatttcttattttaattgaatttaaaattataagtactattaggatggattaaggacaggataactaactattcatcaggatacataattgtaataactgtacacagttatatacttctggaagtgatgtggataaccacaatgaagtatagagggcaagatttgtactgctagagagacaaaaatttacagttatgaaatcaaactgccctcaaggagatttgattcaatatgtatgtgagcaacttgaactttccctacagcaacctatatacttcttgctttataaaaggaggaaggggccatttagtagatttggctgaaagaaatggtaattttgttttggttcttcctgtctctaatgaagataaattgtggactaacactaagaatgaggacagggaaggtgtgcagtaacattgaggagaaggaatgggtcatatgcagtattaaattgatgagtgaatcctggtggctcctctgaactgtgccaactagtcttctgagatgtgtgtttctaaatttgaaaaatgataattcagaataattgtaatttcttttcagttatggttcactgttgcaaattagcagttgagcaggtggtaaattggattttaattgacatcaatccacttctgaaaaaaaatgtattatatctgccactttaaattcatttttttacaatggtctagaaaattcaaaacatcaatcaatttaagggactgttgtttacaactctaataacttcccgttgcttcttgggtgaaggtcagattatctctaccatgtcctaaaatgatcttgtcttaattaatgttctattggttggagaaggcatcatgaccaataaaagaaagcatttaattgtgggcttgctcacagtttcagacaattacttcttgatcataatggagggaggcagacaggcatggcactggagcactggctaaaagctttacatcctgacctgtaggcgataacctgagagaaaaacacagtggggctggaaagggattttgaaacttcaaatcccactcccaatgacacactttctgcaaaaagggcacaattcctccaacaaggccacaccttctaattgccaaatagttcatcaactggggactaagcatgcaaatgtatgagcctacaattgccagtttcattttaaccactactgaccttcaagtactggccctgttttctattattttgctttgattaatttttatgcccattagcaacactgcctttttaaattttttttgttctttcgcataatatacatgtcctaacctacacccagagaacttaccattgccctatgtgatccctaccctcaacaaacatgcctttaatgtctttagatcacatcttatgattcaaatcttcctagaaatctatacacaccttaatatgggttgtgctttttttaggcattttttattagatattttcttcatttacgtttcaaatgctatcctcaaagtcccctataagctcccactgccctgcttcctaacccacccactctcacttcctggccctggcattcctctgtagtagggcatatgatcttcgcaataccaagggcctttcctcctattgatggccaactaggccatcttctgctacatatgtaactagagccactgctttgggggttactggttatgtaggctaacttcatacattctcagcacttgctttcattggcaactgtagaactcaagtgtattcagagtaaggagggaagtctaccaatatagggtcttcagaatccagttagggattttttttcttttacctgtcactgtacttaagtgtctaagaaagcacatgctcctagtaaatgccaaacttccttaagggaaatgagaaaagagtaaaaggcacacaggaacttacaagcaagaacatcatagggtccaatacaaaaacaaaagtagcgtctggcttccacaacaggtgacaaggaagctttgcaacagatttgggagagtctctgggccaaagttggtgttagatataaatatgacggtcttaatataatattccagggagagatattttgaatagctcatagcatgccctgctgctgaaaggtcagaagagataaatttccaaaagcaaggtcatgagaggattctaagttttggtgtaacctagtcttctcatagaggtgctggtgaaatattgaagaatttcaggttggaattgaaaacaaattcattttcatatgaacgaccgtgacatttttctgcaggatgaaaatgagggaggtcaggttagaatcaaaaccaacaaattaaatatttctactgttactaaggagggaaaagaatttaatcctatgtactaagaagaaggttatctaacacaatgagtatatattgctggctagaattatgaaagttacggttttggaggagtggtagaaggggtagtagagtttgctacaaactatgtaacggaagcagagtaagcaaagagaatcaataaacaaaaagaggtatgtattaatgggtcctatttctgatttttttctctttccaagctttctccaaatcctgtaaatgtttgaatttgtattgatctggcctgtaattagcaatgggaatgagagggaaatacagcatgtgtgtgttgaggggagatgtctagatcaggaagatatgagctaaaagtacctatgatttgtgttacaaaaaaactgtttccagtctctgagtgaaaacttttgagatgacggattagttcatttaatgaaatatcacatcacatctgttaacatacatgaccaactattcaatatatatgatctgagcttaaactccatatttcctagcctcagaaaccacaaaattttggtatgaggaaaataagtagtatgcagtattcacacacacacacacacacacacacacacacacacacacacacacagacctcacacaatttaaatgcctgtttctaggaaagaggataagtgaaagctcgatgccccagtgtaggggaatgccagggcggagatgcagatgtatgggtgagtgggggagcaccctcataggagcagggggaggagaatgagatgagggtttctggaatggagaccagaaaagaggataatatttgatatggaaataagtaaaatatctaattaaaaagagtcttaaggttgcaaaaataaaacaatcatggtattattttcatttgggctaagatggctcagcagttaagagcacttgctttttctgaagatccagatttgattcccggcacccacatgacagtttacaaccatctgtaactgcagatcgaatcagtcaaacacgctttctagatctgcacaggcaacagctattcgggctgtacacagacatacatgcaagcaaaacatgcatatgattaaaataaaaataatttaaaaagttaaagaaaagcaaatctgtagacttaaaacataatcaagtttggctttcatggacctttggatagatataaaaggatttgatgtaccagcacataaaaacctggacaaagttggtttttttttttttgttgttttgtttttcccaacttttccaggctagttaaaaaaaaaaaaaacaacaacaacaacaaaacaaaaaacaaaaaaacagttctatgtgcctggccaggtactctctctcattcaaatctggataggattcaagaagtacctggtacaggtactcatcatcaaagttcatggtccccgtgtctgggtagaaaaatatgtgctgtcattggtgaacagttagattccacgtggacaaggctcagccataaccagtctccagtggattcacgcttttgtgaaattgttgtctgtaagatttatatggtcttcattacaaaattaagggaacaatatgagactttgtgcaatggataggaaaaaaaattaaatgcttttaaaagaattgagcagtctccgcagtagcttgtcttcaggagaaattattttttagcaatgatagaaacttactgaccataactttcctgagaagtgggaaagtgagtagcccagccccttccagctagctctctctctctctctctccttttcaagctaagaaggcaggaaagaagcccttcttaacttcacagtgtccaggcacaagctctctcgcactccttttatcccattcatatacctgccttactgagagcaatggactgttgcttgttccatcctatgcatcaatgaattgatgtttgattttgcacagattcaaaacatatatactgcaaagatggaaaattacagaatatccaaagctcatattcaaactagatacaaatcagtagtaatgttagaattatgtaaccagaaaaagctaaaaactgaataaaatgctaagatctttaaaagaaaaagtagacccccccgccctgataaaacagatacataatgtctatggccagagagaaactcagaaaagaatagggagaaatgataaatacatgctcattagacaaaaatcttgtgttaacaaggctgaggctcatactgagaggtgttgagtggagggtctttaaacatttcataaaaattttaaagctgagccaaagaaaccagccttcattttctgttctatgggagataacgaatctctacctcatttcctaattttaatgtgtataatctctcaccatcaactgggagctcaggaagttcagtaataatatttttgctatgtgatcagccttctcagagagtgaaaggcagagttaagccttttaatcttgagcgggacttgaagaaagacctgggctgagagaggtcctggcagttgaaagcagatgaaggggtaatcagggggctaaggaaaagtgtttaatctactggaacagcccagcattatatacttgtggctcttctctggtgaagtattccatgtgcttcatctttggctaacatgtcttctacttactaacacagaagactcactgctgggttgattttaatagatttcaaaagactatgtattgcacgctattgcttttcatagctaaagttttagtgagcatactttaaaaacacccatacacaaaaaccttgtattttctatgagtcctgaacaaaattacctttttcttttgaatatgagtgtaggtggtattagagtttgtgctgaaagcagagactgaattagtatcaagctgagccttgatctctctgaggtgtttcttttgttcagtgccaacaccgtttaaaaatgcattggctgtgacaattgttaagtatagctttttcctttaaaggtggattgtgttagagaaaactcagctgcagtaatgtgcttatccaagacagcctctgatatttgcttttgccttgctttagcctgcgtttccttcctttcctttgtcagtgtttttgttgttatagcataacttccacaacaataaaagataatttatattttaggagaataccagttatagacagtgaatcactgatgtgtttagaggccaagaagtctgtttatagtttccaaaagtggatttcactttttaaaatggtaagtttaataagtaggaaacagaataatgggtgtcaagggaatagaatgttatccctgcttcccttaaaagtcccattgaaatgtttttctttttctaacacagcgttgtctctcttcagaacttcagtgcttacatgtagcaggtgtagacctatgtagatggtatgtctggttttctggtactttataatacttagacaatggaaaaaggaggggggaaggcaagccagcagcatgtctctctctaaagaaaacagtggaaacaaacaaaccaaaaacccaagacaaggattttgctttgctctgttgacttttgtctccatctcttgcaggccagctgccctgtggttagtcaggtccttgctgatttttagtttcttcacctacaacatcagggtttgagaaaattgctaaccatttccttgctcaatattgatgtcaaactctaaatcttctcataaaagtaaaatctagaataaatgattcaaatctatataaagcaacaataaaggtagataaatttttatagagttgagaaactctaaaaggaaggcagtgcaggagagatgatcagacagggtgaatattgcacctctgcccaggtaatactcaattcttagctcttcttgttatacatgcattatgcttatgttgtcttctgaaaagtgtgcacagaaggttgttttgtgtacctgtacaaatgacagaataacctttttcttttgtagtgctctcatttgctcgtaatatttgtggaaggaaagttttaggatacccaaacaatcagctctcattttcttctaaaattgttgtctattttcttgtaagttctgtttccggagtcttggccttataagaagatatttttgctctgtatctggttttcttgcccaaaccaaaatagtctaatttggatgccttgaatgcagttttgaaagcaatactttaaatgtaaagtattgtcattcaacactagttaccatggtaatgaagaatgttatttgatttaagcaaacttttcaaaaagggaatttctattctatctcttttcagttgatatggctgtctccatgtctgccttttaattccattgtccaaagtaatttgttttgctaagattaatgtgcttatttcttttcctaagaaaacaaatttaaaaaattaaaaaccataaaattttgagtcactacaaataatgttctttcacttttaaagtaattttataattccatttaaaacctccttaagaagcatctataaagactttgtaatacttttctcatttaaactttatttttcattaagaagagttgccttgatgagaatttgttttattcatagcttatggcaaataataactactcgatacatgttttgttgagcaaggaaaaaaatgtataaaatgaagtaaaactctaactcccctacatattgatcttatgcccacttctaaattgtcttccattaaagattaatggtctttgttgatgtgggagaaatggaaaagtcttatcaaatatatttagattgtctcttagtaccatgaaacagaagagtactcccctctctttcacacacacacacacacacacacacacacacacacacacacacttgcatgtgcttgcttttttaaattaccaacatgtccaacaacgtttggaattctgaggttacagactagtataaataatacagttatcatttacttctaatctgggtgtctttctgtatatttatgtctcatataatttacctgtaactcactaagtaatagacatgttgtagcatggaaatccagctctcctcttgagattcttaatctgtccaataaaggaattaagaaaggactcaactggatgctcaaggactctagggtatacaggatggttgagatcatgatataaaagcatactgcattgtgccacgtttgggccatatcaaatactgttacctgttacaataaatctgtatctgatagaaatttattttaagaatgagcacctgcttgtctgatacagaactttgtagaacatctggacaattggaaatggttcattttggactttggtcctccttagtggaatgcacatggattttcacctagtacttcaattcaagattcatggagactctttcagaacaaggtgggaacctgacagctttatcttttacaagctgtgtttcaaagaagctgattctgaattttgtttgcttaatgcaacatgcttattagagatcactaccttaaatggaagaacaaggagttattaggtagagggagaagttgaacagctgttatacagtctcaatctagtgcagatacacggataataagatatagagtaaaggttgataatcagagctgctggaatagggctgacagagctatgcttttttcatttgtgagctgttctgggggaattcatagcccttgcacataaagccaactcataagtaaattaagcctctcaatagctgtttgactgcacttttcagagctgagcaacaaaatctttgaagaggaatatgaagacaatgtctctaccaacaacatcatagctaatttttttttacttttttctcatttaatcaaaagatagaaacatgaaatgagcactatattgaccaggatgtcaggagataggcataaatcatgctgtccaaagcattggctcatgctcttctactgactttggaaatcaagactaaaagctttcttatgagtttagggttctttctttattctttttaacaaggaagactttatcttcatttagatttatttaataaaataattgtatatagtcaaggtatataacatgacatttggtatatattgtgaaatgacaaccagaagcaatctaatgcatacatttccatataacaatgttattttgtctgttttcatgataatatttaagatatactttcccgttagatattctttctgttatattcttttgcttctaagtactgcaaagtatgcacagagaaatatttgttagtgttataaaataattttaacttttagtataaaatcattgtaaaagaaaaaatataacatggtataaaaaacagaaccaatagaatgtgtttctatataatattcatagatatagacactatataggtgagatagatggatagatagatagatagatagatagatagatagatagatagatagatagaggtatatataaatataggtagatgattgatgggtgataggtagatagagagattgataaatgattaatagatgctagatagatagatgaaagatagagatgatagatggatagatatatacatacatacccatgtacatatatacatcataacatacccatgtacatatatgcataatagataggtagataatgatagagatgaggatgataatgatagattgattgaaggatctgaaaatgaaattattttgaactggcctacaccactagatctaggcaatcaataaatactgtctggacactaccggagtgaattaagaagttaaccaatccaggaagctcaacagtctcaatctaaggctgacacttcatggaaagttgatgttgttgatggtacaccaaaagggtgatgaagccgaagtattgtggcagcagcaaaacttgaactgactcaggcagaaatggctcatggctgtctaaacactgctttcatccaacttcttttacagcagaatgccagcttcttggaatttatcattaatatttccattctctagccatgcatacacccccacagaccctctaattttctcacatggtcctctctcgaaatgacccctggagcacacagtgatatttcagcaatcctacatgtatctcagtgcagctgacatgaacacaaagaccaaaggtcacatatctatattcaaatagtactttctattttgtaaaatgagtgtaagatctcgtaagtatcttggtagaatcatttttactaattcattttatattgtccagagctagtttctgtttccttggcaacacaccttctaaaactacctgttatatcctctgtttatttttcactgttttaaaattgtattttcttatttatttttaagatgggatctcactgtgtaaccatagctgtctcttatttgcaattttcttgcctcaagctcgaaagtgttataatagaagtgttcctcttcatgccggcttattccagttagctttataactaaggtcagtgtgtcatgggggaacttcagtgtcctttaaggatttgacttgggtgctttttgaaaagaagaactggcaacttaggtataatataaatattgaatgagagaaaagttttatgtattaataaaaacataagagatgtctcttttgtggcaatgctctcaaccttgagagatgttttatatgatagcctctccttgcttatgagcatagattattcaaaataagtgcaacattcatttatatattggagataatggtgaggcagacagagtaaaatggccacctcctgaaacataataatttgaaattccctaaatctgtctgacagggtctctccagcaaacaagtttctccccaggatgttatgaagaaactaattaagttcggtggtcaagagacacttaggttataacagaatagagttcactagtgtcaatttttttcataaatcattttttctttgtacagataggaagatttcattccattctcacaacatgaatagattcccatgttattttttgtcatgacataaatacctgttctggttagtataacttcacgtttccaataattggaagattgatcacctcccacgcccccaaaaaaaggtgacacgaaactgggtcatagcaaatgtaacaaaaatcaaatcattctaaattgcgaaaaagtatttttcttattttcttctttaataactagctattttgtataataaattattgtctatgttgcacacattaatgtaattatgtatagactgtcctctaggtttgtgttattgattgagtttgagagaaataaaaagaaagtgaaagtctataatagcttgtgtcaattaaggaatcccctactggtgcgaaatcacatccagacatctctacctcattagtcagctcatcacagcctcattgtaagtcccttggttcttgtcagttgctttaacatcttccttcaagatgccctgtgaaaggcttgagcaccagtgctggaaagctgctgttttctacagaaattatgtgacatctgagaaaccactaggagtagcgttttactcttctttctcagcaaatgaaaaatcaagttatgttttctccaaaatcctatgaagaatgagatggcagctgaagtaattgttggcaggaatctgagaggctgaaacctacacataactataactgatctttgttttcataaaggacaaacaaataaaatcggtgattaaactgtaataggaaaagcctaactgatcatgtttagggagttactcatatattaataataacattttaagaagaaaaattacaaagtactgcatatttcttgtgtgtctgtatacttttcttaacagtcctgcgtgacagctgaagaagttttaaaactgttcacttactgtccttcacatttactatgcttatatacttatatactattatttttctataatgttatactcagagatttttcatcatggctttgtaatgaaaatctggggcagatataaaaagaggcaaacccatcactgggaaattatgtatgaatgcacaataatatgcattaagaattcacattgttgcctgcttttaagcaagtttggaaatcattctccaaatttcaatctgtacatttagctcccaagaatatctgctatatattttgggcaaaacttacttttacatgatgcataaagttcttgattccttttgggcttaagttttattttcagggtctattttggaaaaggactaagtggttaaaataattaaattgggtcaacattgccaactaatcttgcaaacttaaaggtaagatcatgtattatcaaaaatagaggccattaatttgaaagggagcaaaagggtgtttgtaggaggttttgcaggggaaagcctcctatgtaggggaaagaaaagtctagatggtgtcattataatcacaaataataaaaaaattaaatttgaaagaagaaaacatacaaatttcaaaagtagttgacattcattttattggaactaattatttgttcatttattggacttcatagattaaaaataacaatgtaacagatgttggtattggttaatttttcaaaaatgtggattcaaattaaagaagaaatatgtgtcacagctttggaactccacgcttcaaaatagaacaagaaaacctcacgcccttcttggatgctacttcattttgcccagttgtgttttaaagactgtctgagtgacaaaaaacaaaattagtatggaaaccagtgaaatgattcttattccagacatgaaagtaaactgaatgccttgttcagtaatactttgtggccattctgcttagggctgtgacctactctcttcatttgattcctctaaactcatttatttagtcaccacaataatagaattagaacatttcatcataatacagttaatgcatagaaagtattaacaatttcttacaatcctcttgttgcttcttttactaaatcattctaccacttcccagaagtcacaatgaagtataattgacagtatcattctgttctcattgctgtgtttggatttatatatactgtgcagaacctatgcatgccttcatcgctttctatctcaatgaaattattttgagaatttccaccctcaagtgtacattgatgtatttccattcctagttatatttgaaagcatttagcttccctttaatttgtaagtagtctattatatggataaagcacaggttgcccatctcatgtttatgagaaatgtagatatttctgattatggttattttttaaatagtgctattggtacactcctacttgctttctaaatcacatgtgaatgttgctgcaggacatggaatgaaaacatttggcaacagtcagtgtaaagttcacatatcaaggagagctctaaatcactttcctctgtcagatctgcatcatcaagtggcgtgcgacaagaagtttggtctttacattgatcttgcatcactgatttctggcaaatgcttgccacattacacaagagctacaaattgtatttttttttgcaacttatgttgcccaaattaataacactgtacaactcttagtatttaatatcatataactgttttctcaagtccatatcaaagaatattctttttgaaatattttcagtgactgttattttgttaaaaaatgtatgcagacaataaggaaaataacaaaccatattttgacattactctcattacttattttttcacagttgatattttatttcttttgacagaacgattccgggatttgctactgcctccatcaagtcaagactctgagattctgcccttcattcactctagaaattaccctaagtaagtaagagatgtttgtggatattgagaagggaatggtcaagatactggcagaaattgatgcagggaaggtgaaatattattgttctttgggacttttacaaatcccaagtaacctagactgactaattgggatctcacttgtaatgtatgataattgactctttacaaattagatctggggatcattgttctaaaatataacaaagttacttatattttttaaatttatgaactcacaagacccattgccaaaaccaggaacatccattccatcttcaaaatttgagtgcagacattgttctgtgaatgttcccaaagtgtgactagatgagaacaaaatggatgacttaaaggaaagtacacttactgcaaagtacgcatggatttagagttagaagatgaggtggccataacaagcttcattgcccagtctttgctcaggtcactatagttatgtctgaagagatgttggtttatgatatatctggatgtatatatttataatactatccttataaaaaaaaacagctcagatatgtgaaatatttgaggacacttaacaagattttgataatatattaaattgaacaatcaagtccccaaatatgagccagtagctctggaaggcttagtatgtgtacaaataattgaaaaagtacaggaagaactgacatctgctttgtttgctcaaggattaagttctatgagcagtagcatctagcatccactgcttataaagaggaatattattcatgacagaaatcagaatagttttttgactttactgccaaaaaccaatcttaattgtttggacagaaaaatctgtgtcacagtgcactctcagttccaactggctgcctaaacgtggctcaaatgataacactgggtaatatctctcaagtcctcagataacctttctcaggtttccttctttgctggataatcctcctttctctcctgtgtattctgtattctgtttctagaaattatcatttcttcttcagtaattttaagctcagttatgtgaaatgtattttgagccaaacttttattatcatcaataataataaagtaatattagtaacatacagaatatctttgtgtgtcagggattatactatgtgtaaggtcttttgtttatttgctcttttcttttgtgtggtttggtttggtttggtttggtttggtttggtttggtttggtttgctttgctttgctttgctttgctttgctttgctttgctttgctttgctttgctttgaatttttgatttttgtggtgttttaggacaggatttctctgtgttcgtctaactttcctcgaactcactctgtagaccagactggattcaaactgaaagatccacctgtctcttgagtgctgagattaaatacttgagctaccttacccttaatactatatgctaaatgctttaaatacttcttgctttaagtgaacacccccatataatcttaatcatttccatattattattactatttattatatattatattatttgtgtctattgtgaaggatgttatttccctaatttctttctctgcccttttttcataggcacaaaggaaggatactgattcatttgagtcaattttatatccaaccactttgctgaagttgttcatcagctgtagtagttctctggtagaattttgagagccactaatgtctagtatcatatcgtctgtgaatagcgatatcttgacatctttctttccaatttgtatccccttgatctccttgtcttattgtcctagctaggacttcaagtactatattgagtagacagggaagattcggcaaccctgtcttttccctgatttgaggaggattacttccaattattttccacttaattttattttggctattgtcttgctgcatattgtttggtcatgtttaggtatgtactctgtgtccagttttctaatgcctttaacttgaaggggagttaaatattctcaaaggcatttccagcatatcatgagatgatcatgtgatttttttctttcactttgtttatatagtggatttcattgatagcttttcatatattgaaccattgctgcatccctggggtgaagcctacttgaccatggtgaatgatggttttgatgtgttcttggattctgtttgtgacaattttactaagtatttttccattgatattcagaagtgaaatagatctgaagttctctttctttgtagaatctttgtgtggtttaggtatcagaatacttgtggcctcatagaaagagttaggtagtgttcctcctgtttctattttgtgaaattgtttgaggaatgttgatattatcttgtctttggaagtcaaaggataattctgcactaaaaccatctctccctggacttgttttggttggaagaatgttattgactgccattatttccttaggagttatgggattatttagatagtttatctgatcttgatttaaatttagtaagttatatttgtctagaaaatcatccatttcatttagattttttagttttatggaaggaaatgcaggctttggaagaaaaatctaatggtttttttcttgttgttgttgttaatttcctcagtttctattgttatgtctagctttttcatttctaattttgttactttggaactgtctctgtgccctatagttagtttggctaatggtttatctaccttgttgattttcccagagaaccatctcttggttttgttgattctttgtttctaataggctgatttcagccaaagtttgactatttcctgccatcaaatactctcggctgtgtttgattcccttttgttctagagctttcaaatgtgatgttaagctgcgagtgtaggatctctgcaatttctttattaaggcccttctgcaatgaacttgcctcttagtattgctttcttgggtatgctgtgctttccttctcattggtttctaaaaagcctttcttatttcttccctgatcaactgatcattgaatagagagtcagtcaggtcccatgagtatgtgggctttcttttgtttccgatgttgagaaaaccagttttagtctgtggtgatctgatagaattcatgcaattatttcaatcttcttgtattcgttgaagattgttttgtgtccaattatatgatgagttttggagacggttctgtgaggtgctgaaaagaaggtatattcttttgttttagattttgttttgttttccattctgtagatgttaaattcatttgtttcataacctctgctaatttcactctttctctatttactttctgttttgataacctgtccattggtgagagtagggggttgaaatcccccactaacattgtgtggtgtcaatgggtgatataactttagtaaagtttcttttatgaatgtgagtgtccttgcacccaaatcttagtagatttttcctttaatgagtatgaagtgtccttccccatatcatttgataagttttggttgaaaaatctattttattagatattataatggctactccagcttgtttgttgtgtccatttgcttgaaaaccctttttctagtcctttaccctgagatagtgtctacctttgttgctgaggtgtatctcttctattctgcagaatgtggatccagtcttcttaaccagtgtctttttattagtgaattgataccattgatgttgagagatattaataaccaataattgttagctcctgttattttgattttggaggagttatcatgtatctgtgattttttttttcttttggctttgctgtgtgatgattaatttcctatgctttcttagttgttgtgaacctcatgtaggaattttccttctagtatcctctgtagggccagattaatacaaagatgttgtttaaatttgatttaggcatggaatatagttttaatccgaacgttatatagacctctggacctcccatgatcattatttgtaaactaactacctgcagtaatgcagttctagtagagatgtcagaattgccagggatactgtgtttcacatcttagcctttattcaggcataccatctttgaatagagtccaggctagggtcctggtctgtgtgttttaataaaccttccaagaaattctgattcacatgctactttgcaattaattaaagcaaaacagattttgaagaccatgtcaggctctaatgttccctgacggctttttatggcttttactgatgtaattatctcctgagtagtctaaattgtaatatcatcttcttgggagtagttactcattatcatttttcatccagatgaagaagaaactgttacctgatagatgatatatgactatatgccctttatttccctaacaaaaataaataatgattgacaagcatagacattaaggaaagaaataatggagatagattaaaaaataattgaggaattatcttatatttaaatagaaggtgtggtcattgcaataaaatgaaaatttattttccctactttaagttattctgtgactctagagtgaaggtacatttagaatactaagtacagcttccagaacagaatgaattttgattaaacagtttttatactctttttttttaggctctgagttaaaacttaaatatttgttgatattctttttttaatttaatcttttactttctgattgactgactgactgattgattgattgattgattgattgattttacaatccagattttttcccctccctggtccaccctctgactgttccacatcccatccctcctcccaccccctgtctccacgaggatgtccccaccacccacacacacaccccacccttgggcctccagtcgcttgagagttaggtgcatcttccctgattgaatccagatccagcagtcctctgctgtatatgtgttgggggcctcatatcagctgatatatgctgcctggttggtggttcagtgtttgagagatctcgggattccaagttaatcgagactgctggtcctcctacaggatcaccctactcctcagcttcttccagcttttccctacttcaaccacaggggttagcagcttctgtccattggttgagtgcaaatctggcatctgactctttcagctacttgttggatctttcggagaacagtcatgataggtcccattttgtgaggactccatggcctcactgatagtgtcaggccttggaacctccccttgagctggatcccactttgggcctgttgctggaccttcttttcctcaggctcctcaccatttctatacctgcagcttttttcagacaggaagttatgggtcagagttttgactataggatggcaacccctccctcacttgatgtcctgtctttctgctggaggtgggctctataagttccctctccctactataggcattttatctaaggtccctccctttgagtcctgaatgtctcttacctcccaggtctctgatacattctggaaggtccccccaacctcctacctcccgaagttgcctattttcattctttctgctggcccttaggacttcagtccttttccctcacccaataccagatctggttctactcttccaccaccccccaaccccagtccactttccctcccaggcacctccctttcccatgtgactgctttttttccctcccaagtgggactgaagtgtcctcacttgagcttgttgacctttattagtgagtacatactatgcatgtccttttgagtctgagttacctcactcaggatgatattttatagttccatccatttgcctgcaaaactcagcatctccttattcttgatagctgagtagtattccattgcataagtgaaccgcattttctgcatcgattcttctgtcgtggggcatttgggttggtactagcttctggctatcacaaacaaggttactatgaccataggggaacatatgccactgtggcatggtggagcatcttttgggtatattcccaagagtgatattgctggatgttcgggtagatctatttccaattttctgaggaaccttcagattgattttctgattggttggaccagtttgccatcccaccagattttctttcttaattttctttagaaagatggcatcttttttttttttaaattgggtattttcctcatttatatttccaatgctatcccaaaattcccccataccctcccccccactcccctacccacccactcccacttcttggccctggcgttcccctgtattgaagcatctaaggtttgcaaaaccaatggaactctctttccaatgatggccgactaggccatcttctgatacatatgcaactagagacacgagctctggggggtactggttagttcatattgttgttccacctatagggttgcagacccctttagctccttgggtacttcctctagctcctccattgtgggccctgtgatccatccaatagctgactctgagcatccacttctgtgtttgctaggccccggcttagcctcacaagagacagctatatctgggtcctttcagcaaaatcttgctagtgtatgcaatggtgtcagcgtttggaggctgattatgggatggatccctggatatggcagtctctagatggtccatccttttgtctcagctccaaactttgtctctgtaactcctttcatgggtatacttttaaagatattataaaggattctgaatatagccacagtaacaaaataaatagcaataataaaataaaaataaataataaatgtttgaattataggtgactaaactgatttaaatatttcatagtaaatttggttttcaaggtattacatgagaccttatttatgtatgttctttatgattaaatttatcgattcataacaattgaatagaggtatatgaaatgaaaagcagttgattctcagagattcatcagagcaaatccatgttttccctatattgttttgggctctgtctgcctctctgtctatgatgtactttgtcccaatgccataatgtggatacactgatatcaacattagtaaagtatctctgatgtttatttgcattctccaattcctaacaggttttctctgtgtcatcacatcttgtctcttttatacatgaagtacatggagtacatggagagcacacataggtcatctgtgatctcattcctagtaaatagctggaactccaagttctagggttcttgttcaaagctattacaaaacatcagagaatggctgtgtggggaaggagaagcatgtgttgttttagaagcaaataattgccaaatgggtatttttcatgattcctcccatttgcttatgaaataaaataaaatttattggtgaagtttgtgaaggtttcttaaaataccattgcattcaattagtttattttttatctaacttatttgatgtgactttcagataaagatacaaaaaaattatagggtagaagtcaagtcattgttggtctagaagcatgcaaagaagtcacacatagttcatgatttatatatgaagtatatagtagtaaaatgttttccatgtttaaaatactacattaggcatattaactttggttatttttttttctttaggtaaaagcttttttgccttcctttactggctacagtatttttcaaaagcaacctttgcaagttttctctctagataatatgcatgcattacctagaatggcctaaattttgtcagtgtaaacagttaaccttgaaatagcaatccaatgtggttcggtgtcgtgaaacactaaagaatttgtttcctgcaacagagcatcttctgtgggtgcagtgaatctctaggatgacgtcattcaatcaacaatgcagaaattcgatctgtttcccatttctgtgtccacacatgttttttagttaccaaagatgtgaaatgatgtttgcatgtccaagaaatggcaaatttcttatatttggtatgatccatatgacccaatacaatcacagatacctataaattcaagtcgcttgtgtaaagctgaaaaacaaaatataagcagtgattatataccatgaaaccctgcattcaaagaaatgcctattaatgaatttattctacagacatttaacagatgcctaattattaatttcacaagtatgttgacttacctggccttctatttaagtgaccttcaaacataaatgacatgtagacatgctataaaaatagactgtttgaaaaagaaataatgaaaaaaaattataaaacagcagtgtcttatattcataggatctatcaagatgtctcaaatgtcacaaatagtgtaagtatggtctttctccagtaatcacggctaactcccttgatcataaaaatgaatgttttttagacatcagggattcagaaggaaagatgaagtgcaagagagccacagcatccaagtgagagagcttgttacatctgccaaaataaccacacagtcaaaacagatgaatggaatctgggaaatgtggtgttttggctagacatttgcttccctcaataacattaatgttctgttactaagaaaaggagggtggatattaaatggacaaatcacaatttctgtgtagttaaggatggttgcataacacaaacacacacatatacacacatatttaaataaccatacaagagcaagaacaattttctttgtgattttttttttcggtagtgtttatacttactaatttatccagggaaagagaaggcacaatataagattctcgtcctccttctcttcttcctcctcctcctcttcttcctctttctcctcctcttcctcttccttttcctgtaattttctatttccatagttgatatgaaactaaatgtgtctgtcggcgcactcactactgaaagataaactatccagttcgtttgccaattatcacaatgaaatatcatcaagctttaacatattgttatttctataatttcctatacttttaattaacttagaaccaggagaaagttcatgttttactatcaatcactcaaaacaaattgcttatttctttggacttatgactaagaaacagttagataagtcccagaccaccacaatgctataatttggattcaccacaaatggtacatggtatagaaaaataacttttcgtcttttcaaactttgtctgccttccctataggttatacattgatggtccatttggaagcccatttgaggagtcactgaactatgaagttagtctctgtgtggctggaggcattggagtcactccatttgcatcgatactaaacactctactgtatgtactttgatcaatcttattactgcaaatagagaaatattcaaacacatataatttacatataaaataattctttatagagttttcccactcagtattcaagaaatgacatttcctaattggtgaaagaaataattcagtagttctcagtgtatgatctgtagctcctagaaaaacaaactcatcttcttttatcaatagttattcaccctcagacttcttttcttgacctcctcacagtggtgtcactgttcatttattcaattaacaagtatttgggggtgctcttgtgctaattaatcttgggttactggcaatagaacaatgaatgtaaaaatataaggaggggatctgcccttcattgccaaagtatatgatagaatcaggaatagggagaatcattgtcttcagttttgtgctcactggtgactccaccaggctccaatgattagttcaaccctgtgagcataaagggccctgagtatattaaatggatcatgaagtatctcaaaaatcatgaatatgggaaaggactaatagtggggtaactgggtaggcttatagtgatggaaggagagaagataagatttgggggagagtaataagaatgcactatatttgaaagaaattaataaaatagaaagttatgggttaaaaaaatctatatagattataaaaaacaaatggctgctgtggttgtaagaatatgttcagggaacactttatgacaagatgataaacatatcactaactcgttccttcatttattaacatatttgcaacagactaaagaaaacaaatgtcaacattgagattgcccaattgggaaatagtctcaccattttcattccaggattataaacttaaattcattcatcatgataaagtacaaacaagatgacagcaagatggtgctcccagatcgcttccattcccttctcaagtagacaaagttaaattaaaatgtgtgagaggaaatctaaaaagaagaagaagaaataaaactttcctttggcttagttgggagaatcatgactttaagataaactagagccttgtctcaaaaaatttttaaaaatgaatgatattttgaatattttatttcattttctaatattatactaaatgtgatttggggacatgttggagactcttacaaaaataagcatgttccagtccagaaatcatttgtttcagacaacatattacaagttattttgattcttagtgttattaaaaaaaggaacattttcttaacctcaagtctacctcatagtcataagtaggcatccagacttggaattgtgagtggctggaatgtattacatagtgtgtgattgtgaaatctttcttaaatggttattaagaaaaggataaacaaccaagtttctggaatggtattacctagaagtgagggcaactctgaatgacctttggatccctgcacaatgatacagttcattgaaagagagaacttgtttttctgagactcatacgccaacgttcttctgatccaagagttcagttttttatctggaagttgaaacaggtgatatgtataatactggcaaatatagcattctgtgacatcttagtcaccgtattgtgtgccatatctgtttgagagttatggtaaatgttggcatggaaatggctgaaatggggtctgtttattttttaattggttgtgtatgaatgaaaagcaaatgttcatgtatatgtagactttgtattgtctatccaattccagttacaacttcattacattgattttaaagggatgactggaaaccatacaagttaagaagactgtactttatctgggtgtgcagagacatccaatcattccagtggtttgcagatttactctgtgtgttgcataacaaggtaatattgggatggtttattattttttagttttataatttcttgaataacatttacttgaatatcttaaaatcaataaattctcactatagaacagaagcctctcttaaatccaaaaccagaggtaatatcaaataaaaataaatgcatatctttttagatatgaatgtttgttaatatatgtctttctctgacatttttaacaggtctgtctgcattttaacataaaataataggtatctatgaacatgactagagatgatgaggcaagaaagacaaagtgatcatcacagacatgacagaatcttctaacctctgttataaatttccctcatattcttgttttaatgtttttgtagtcagcatgtttcttgatccactttaaagttttaaaagtaaaaaaggttcttgaactagttcaataggaaaatataatctgctattatatttttcttcaaattattttaaagtgtattgctacatattaaatgttattttttatgaatgagaataaaatcaactcattgtctctattaaaattgagaatttttgggctcactgtatatgatttacttttcactttctcagtattggctactttgtatctgtacacagcgcttcagtgattgttcacatgcttccttaaaatgttttttcttcatgaagctaagcatgttatcatccagaaaatatcattaactgtctcttgagaattagggtctgtcttaagatctaaagatatagtaggtaacaaaataaaaccatgatttttatctctcttgtattcatagtaaaacagacaactaaaccactatatgtgcagtgtgtctgattctgagacctcaatttgggacaaaaagaaaaggaaagtatatcaatgtggacaccagaggctctattttcttttcttttctctctttttcttaaaattttattcaatattttctttatttacacttcaaatgttatcccgaaagctccctatacccacccccaccctgctcccctacccacccacccccacttcttggccctggcattcccctgtactaaggcatataaagtttgcaagaccaaggggcctctcttcccaatgatggccgactaggacatcttctgccacatatgcagctagagacacgagctctgggggtactggttagtccgccaagccatgtgctgttgggatattcttgagtgtattgactagtcaaatgccttaggagcaaattcgatacgtacctaactctcaaagttctctgatgcagtcatatgtttactgcaatggtagaagaggacggaggtctatagcaaaataaaaagtgagatgcaactggagagtggtttacatgtgtgtacatgtttgtagtgctcttagcaagatagattgcagaagtcttatagactttatattagaaaaaaagagatttaaatttatacctagtattattgaagatgtggattgaacaaagatggttctataagaattatttataatagtccaaatattcaaacatgtcatctataactaattggaaaaaagagctctgtatttatataataaaatcatttaatattaagataaaagttctgacatgttaaaacttgagtggaccttagaaatactatgataattaaagtgatgtaagtcagccaaatataaagggacaaatactttatggtaccatttacataagatacttggaatagttcactttgtagttcattaatgtagaaaaatagttcctgggtaaaagagggaaaggagagttgttccactttctctagtttgcttctttgcaggtgtacttctggtctcccatagccttattttttttcaaggaaaatacatagagaatgagtagaaagccagatggcatgtctactttttatgctttggatttattttcctatctgaatatcctatatccctactgtctcttttttaaaggaaaattatgtttattgatgagggaagccatgggttaaaatttaggtatcttagcaaataaaatagaggttgtgtataagaaactgagaagaataatatattgcttagcatgatttatctttagattgtgttcttctatcatcaaaaccatcatcactaaatttcaccagagcaagttatggtgagagaacttgtgtatcatctgtctgtctatttattaataacctatcacctctctgctgacttttattttaatataaatatttactgtgataagccaaattatctactgcattatagaatcacatatgctaggtacaaactgaatatttaggaagaatttaaatgaggcttttcatttttatgttctctcagttttggcaagaaaacagacctgactttgtgaacatccagctgtacctcagtcaaacagatgggattcaggtatgtggctggatgttattgttaattaaatgagccccttgataatagaagatttactgtaagagctgtgctggaagaaaatttctgcatagggttttagcagaagtgtcctagaggaaagcctctattgggatacatccaggaaactcatagcttgtccttgaagtctgttgttcctttcagttctcctcacaggatgctgaagtaaaccttttgattccatctttcttctctgggtttgtttcaagttccatgtctctagggaaacatcaagtaataaatgaacaacctcatgatctcttttccatagagggaaagttttctgtgatgagaaaagataaagtcttacacaattaaacatattccatcccagatgaatctaacatagaaacagtaagagccacagtgtcttgtttactataagagagactatgctgagaatttcccatacattattttgtgtaatctcaactaatttgagcagtacgtactattactctctatattataatgcaaggcaaactaaggtttagaaatatcaaatagttgcataatgtgatgaatctttgtgcaaatgtttttccatacttaaaaaaaagtgtctttgtgttcgtctgtgtgcacacatatgcatgtgtgcacttcctacagagctcagaatataatcttgaatgttataattaagttcctcacctcctttgagacaaggtcggtatctaaatacccaccaattaggccagactgcctagccagtgggccccaaagacccattatctcactgccactacaagttcctgtcactgcaagttcacactatcatattcagcatttctatgtggcttccagagattgtgctcaagtcctcaaacttataaggcaagagtgtcattgaaaaagaccctagaattttttataatatttttcttcatccctttttattgtttttcagataaaatatgaatgcttatcagttacctgaaaactgtcctaattggcttctgaagtttttagttaatattaacgtttttatttcattttacctcagctgtgaagcaagaaaatatatttctttctgatataattgtaactaaggtatagataatatagataaatatatttacataataatctaataataaaatcagtattgataaattatatctggtactgagtctgcctaactgaaaatcagggactttcttttctttttatttccctctgactgttaattgtcaattaagaacaagtgtttattctctgcaaggatgagccctttaccagtcactgtcttatagggaataaacttaagagatacagtgtcgtgggaagtcatgtctagagttattcccccaaatttgtgatggaaatttgtgttaatttactcatatagtgagcctaatatgacgaatgtacttagctacaaacatatttcaatgacacttaattttgagtccacttaatagtatgtgatgaactggagtgtgttcttcatcttacattgaatttatttaaaaatgaagaaaataactaaaatcaaagtaagtcagcaatttgtgaaaataactttcaaaagaatactgaattttaaaggaaaagaaaatgaaagtgaccctttgcaattgtactccttagaattctgatttgctgcttaggacacagcaatttggaaggagatcctagctcaggtgaattcatgtacgagaaatgtactgtttatgcagagctgcattttataaagcatatccttcctttttgacagaagataattggagaaaaatatcacacactgaattcgagacttttcattgggcgtcctcggtggaaacttttatttgatgaaatagcaaaatgtaacagagggtaagtaatgttcctcatgaagttaacgtatgtctgaagatcacatttcaaaattcctgagtcatcccatgaaatgtttaaagattaattgcaaatatgtttatcacaaattcatttggacactcagtttcaatcaaaagatgaagtaaaatggttaccactctaaaacctggaacatggaataattaaagtatgatttagacatagttaactgtatgcttgctttaacatttatatttttccttttttatttatctatgtatttatttgggggatgaggggttttgggtcaagacagaatttctctgtatagccctggctgtcctggaactccttctgtagaccgagcatgcttcaaacactgaaatccacctgctttccaaatactgggattaaaaacatataccgctgagaggtttgtggcacaggcgccggcgggagccttcttggctccgggactccgcggagggcaggctgcacgggtgaccgtgtggaatacagagtgccagccgtttctgggacgggcgagagagtcgcagagcttctgggcggcgccatcttcagctccagacagccggccaccttcctggtgagagcacgggggtctgcctggcctgagaggtttgtggcacaggcgccggcgggagccttcttggctccgggactccgcggagggcaggctgcacgggtgaccgtgtggaatacagagtgccagccgtttctgggacgggcgagagagtcgcagagcttctgggcggcgccatcttcagctccagacagccggccaccttcctggtgagagcacgggggtctgcctggcctgagaggtttgtggcacaggcgccggcgggagccttcttggctccgggactccgcggagggcaggctgcacgggtgaccgtgtggaatacagagtgccagccgtttctgggacgggcgagagagtcgcagagcttctgggcggcgccatcttcagctccagacagccggccaccttcctggtgagagcacgggggtctgcctggcctgagaggtttgtggcacaggcgccggcgggagccttcttggctccgggactccgcggagggcaggctgcacgggtgaccgtgtggaatacagagtgccagccgtttctgggacgggcgagagagtcacagagattctggggcggcaccatcttcagctccagacaaccagccaccttcccggcaagagccacagagcttctgaggcggcaacatcttcgactccagacaactggccaccttcctggccaaagcaacacagcttctgggaaagatcctgttttgggccttcaccttcagccaggaggaggtccaaacaccagataactgtacaccttccctgagagaggagagcttgcctacagagactgctctgaccactgaaactcagagaagagagcttgtctcccacgcctgctgatagagggtaacaaaatcaacagaggaacaatcttttaacaaagacaactataacaactaactccagagattgccagatggcgaaaggtaaacgtaagaatcctactaacagaagccaggaccactcaccatcatcagaacccagaacgcccacttcgcccaatccaggacaccctaacacacctgaaaaggtagacctggatttaaaagcatatctcatgatgatggtagaggacataaagaaggaattcaataactcacttaaagaaatacaggagaacactgctaaagagttacaagtccttaaagaaaaacaggaaaacactgctaaagagttacaagtccttaaagaaaaacaggaaaacacaaccaaacaggtagaagtccttatagaaaaacaggaaaacacatccaaacaggtgatggaaatgaacaaaaccatactagacctaaaaagggaagtagacacaataaagaaaacccaaagtgaggcgacgctggagatagaaaccctaggaaagaaatctggaaccatagatgccagcatcagcaacagaatacaagagatggaagagagaatctcaggtgcagaagactccatagagaacatcggcacaacaatcaaagaaaatggaaaatgcaaaaagatcctaactcaaaacatccaggaaatccaggacacaatgagaagaccaaacctacggataataggagtggatgagaatgaagattttcaactcaaaggaccagcaaacatcttcaacaaaattattgaagaaaacttcccaaatctaaagaaagagatgcccatgaacatacaagaagcctacagaactccaaatagactggaccagaaaagaaattcctcccgacacataataatcagaacacaaaatgcactaaataaagatagaatactaaaagcagtaagggaaaaaggtcaagtaacatataaaggcaagcctatcagaattacaccagatttttcaccagagactatgaaagccagaagagcctggacagatgttatacagacactaagagaacacaaatgccagcccaggctactatacccagccaaactctcaattaccatagatggagaaaccaaagtattccacgacaaaactaaattcacccattatctctccacgaatccagcccttcaaaggataataacagaaaaaaaccaatacaaggacgggaaccacgccctagaaaaaacaagaagataatccctcaacaaacctaaaagaagacaaccacaagaacagaatgccaactttaacaacaaaaataacaggaagcaacaattacctttccttaatatctcttaatatcaatggactcaattccccaataaaaagacatagactaacagactggctacacaaacaggacccaacattctgctgcttacaggaaacccatctcagggaaaaagacagacactacctcagagtgaaaggctggaaaacaattttccaagcaaatggtctgaagaaacaggctggagtagccattctaatatcggataaaatcgacttccaacccaaagttatcaaaaaagacaaggagggacacttcatactcatcaaaggtaaaatcctccaagaggaactctcaattctgaatatctacgctccaaatgcaagggcagccacattcattaaagacactttagtaaagctcaaagcacacattgcacctcacacaataatagtgggagacctcaacacaccactttcatcaatggacagatcgtggaaacagaaactaaacagggacacagtgaaactaacagaagttatgaaacaaatggacctgacagatatctacagaatatttaatcctaaaacaaaaggatataccttcttctcagcacctcacgggacctgctccaaaattgaccatataattggtcacaaaataagcctcaacagatacaaaaatattgaaattgtcccatgtatcctatcagaccaccatggcctaagactgatcttcaataacaacattaagaatggaaagccaacattcacgtggaaactgaacaacactcttctcaatgataccttggtcaaggaaggaataaagaaagaaattaaagactttttagagtttaatgaaaatgaagccacaacgtacccaaacctttgggacacaatgaaagcatttctaagagggaaactcatagctctgagtacctccaagaagaaacgggagagagcacatactagcagcttgacaacacatctaaaagctctagaaaaaaaggaagcaaattcacccaagaggagtagacggcaggaaataatcaaactcaggggtgaaattaaccaagtggaaacaagaagaactattcaaagaattaaccaaacgaggagttggttctttgagaaaatcaacaagatagataaacccttagctagactcactagagggcaaagggacaaaatcctaatcaacaaaatcagaaatgaaaagggagacataacaacagatcctgaagaaatccaaaacaccatcagatccttctacaaaagcttatactcaacaaaactggaaaacctggacgaaatggacaaatttctggacagataccaggtaccaaagttgaatcaggatcaagttgaccttctaaacagtcccatatcccctaaagaaatagaagcagttattaatagtctcccaaccaaaaaaagcccaggaccagatgggtttagtgcagagttctatcagaccttcaaagaagatctaattccagttctgcacaaactatttcacaagatagaagtagaaggtactctacccaactcattttatgaagccactattactctgatacctaaaccacagaaagatccaacaaagatagagaacttcagaccaatttctcttatgaatatcgatgcaaaaatccttaataaaattctcgctaaccgaatccaagaacacattaaagaaatcatccatcctgaccaagtaggttttattccagggatgcagggatggtttaatatacgaaaatccatcaatgtaatccattatataaacaaactcaaagacaaaaaccacatgatcatctcgttagatgcagagaaagcatttgacaagatccaacacccattcatgataaaagttttggaaagatcaggaattcaaggcccatacctaaacataataaaagcaatctacagcaaaccagtagccaacatcaaagtaaatggagagaagctggaagcaatcccactaaaatcagggactagacaaggctgcccactttctccctaccttttcaacatagtacttgaagtattagccagagcaattcgacaacaaaaggagatcaaggggatacaaattggaaaagaggaagtcaaaatatcactttttgcagatgatatgatagtatatataagtgaccctaaaaattccaccagagaactcctaaacctgataaacagctttggtgaagtagctggatataaaattaactcaaacaagtcaatggcctttctctacacaaagaataaacaggctgagaaagaaattagggaaacaacacccttctcaatagtcacaaataatataaaatatctcggcgtgactctaactaaggaagtaaaagatctgtatgataaaaacttcaagtctctgaagaaagaaattaaagaagatctcagaagatggaaagatctcccatgctcatggattggcaggatcaacattgtaaaaatggctatcttgccaaaagcaatctacagattcaatgcaatccccatcaaaattccaactcaattcttcaacgaattagaaggagcaatttgcaaattcatctggaataacaaaaaacctaggatagcaaaaactcttctcaaggataaaagaacctctggtggaatcaccatgcctgacctaaagctttactacagggcaattgtgataaaaactgcatggtactggtatagagacagacaagtagaccaatggaatagaattgaagacccagaaatgaacccacacacctatggtcacttgatcttcgacaagggagctaaaaccatccagtggaagaaagacagcattttcaacaattggtgctggcacaactggttgttatcatgtagaagaatgcgaatcgatccatacttatctccttgtactaaggtcaaatctaagtggatcaaggaacttcacataaaaccagagacactgaaacttatagaggagaaagtggggaaaagccttgaagatatgggtacaggggaaagattcctgaacagaacagcaatggcttgctctgtaagatcgagaattgacaaatgggacctaatgaaactccaaagtttctgcaaggcaaaagacaccgtcaataggacaaaaagaccaccaacagattgggaaaggatctttacctatcctaaatcagataggggactaatatccaacatatataaagaactcaagaaggtggacttcagaaaatcaaataaccccattaaaaaatggggctcagaactgaacaaagaattctcacctgaggaataccgaatggcagagaagcacctgaaaaaatgctcaacatccttaatcatcagggaaatgcaaatcaaaacaaccctgagattccacctcacaccagtcagaatggctaagatcaaaaattcaggtgacagcagatgctggcgtggatgtggagaaagaggaacactcctccattgttggtgggattgcaggcttgtacaaccactctggagatcagtctggcggttcctcagaaaactggatatagtactaccggaggatccagcaatacctctcctgggcatatatccagaagatgccccaactggtaagaaggacacatgctccactatgttcatagcagccttatttataatagccagaagctggaaggaacccagatgcccctcaacagaggaatggatacagaagatgtggtacatctacacaatggagtactactcagctattaaaaagaatgaatttatgaaattcctggccaaatggatggacctggagggcatcatcctgagtgaggtaacacattcacaaaggaactcacacaatatgtactcactgataagtggatattagcccaaaacctaagatacccaagatataagatacaatttcctaaacacatgaaactcaagaaaaatgaagactgaagtgtgaacactatgcccctccttagaagtgggagcaaaacacccttggaaggagttacagagacaaagtttggagctgagataaaaggatggaccatgtagacactaccatatccggggatccatcccataatcagcttccaaatgctgacaccattgcatacactagcaagattatgctgaaaggaccctgatatagctgtctcttgtcagagtatgcctgggcctagcaagcatagaagtggatgctcacagtcggctattggatggatcacatggcccccaatgaaggagctagagaaagtaccaaagaagctaaagggatctgcaacactataggtggaacaacattatgaactaaccagtaccccggagctcttgactctagctgcatatgcatcaaaagatggcctagtcggccatcactggaaagagaggcccattggacacgcaaactttatatgccccagtacaggggaacgccagggccataaaaggggagtgggtgggtaggggagagggggtgggtggctatgggggacttttggtatagcattgcaaatgtaaatgagcgaaatacctaataaaaaatggaaaaaaaaaaaaaaaaaaaaaaaaaaaaaaaaaaagaaagtaaagaaagcaaattcatgtctgaagttcctgcctttaggaaataagaatttaaaaagcagtaaattccaagctgacacagacaacactggatttttttttcatattttcttatattatagaagttatcactgtagaaattctaggaaaatttcacatacacgaacatacacacacacatacacacacacacagcagcagcacacacaatagaaacaatctgaattccaggaacaaagacagtgtatttcctcctagaaagctggtgggtacattccctctacgtacaaacagcagcaattgcagctactgtttgaccttcataaggctcatttctaaaatgcacttatactctaccgtggctgtgacatcatacatgtgaccatgacctacattggagctacttccatttttaattaatctataaataaactgcagagaacatctttgtccataaaatcattccatactttgaatcacttcgatagacaacctctaaaactgtagctgcataattctgttaaggaggacaattgctgagcacggcttttgtttttgattgtggctgcctcagatgaagtcttactgtacaatctggactggccttgactttacagtcctcctgccttcgcctcctgagttctaggattattgccaggagccgctgcatctgattgttgttgaacacttttaatgcttttgacccttaccattttatatctatacatatgagcatgtgcatgtgtgtgcatgtatgtgtaataacattttttgcctgtagcatttttaagatgtatgacttatgacttaaaggaaaaatctttaattaacaaatgaaagcctagtgtcttcatgtgtgctgtttctttactaatgccaaagctaaatagggttttgtatatttgttaattattttattatttactttgtagtgtttatttttcttttgtacatttatcttttggaattacatgctccacaatttttatattattttaatatttaaatagtaaagattttaatattcccatttaaaactttctattacattttaactgtgtttagtaattttataaaatttattaatggaaaaaaaaaaacatataccatcaccacctggattaacatgaatatttatagtcatggtatatatcaaacgatctgtataaaatattttcagcatcaatttgggtaaataagagaaagtcaccaatgcatctagcaatagtcacattcagaaatttaattttgtactttattattatattgaaatttttttattcttcaaaatctcccaattttttttgcctttttaaaatatttttattacatattttcctcaattacatttccaatactatcccaaaagtcccccccccccaatcccctactcactcattcccattttttggccttggcattcccctgtactggggcatataaagtttgcctgtccaatgggcctctctttccagtgatggccgactaggccatcttttgatacatatgcagctagagacaagggctccggggtactggttagttcataatgttgcacctacagggtcgcagatctctttagctccttggatactttctctagctcctccattgggggccctgtgatccaatccaatagttgactgtgagcatccacttctgtgtttgctaggccccggcctagtctcagaagagacagctatatcacggtccttgcatcaaacacttgctagtgtatgcaatggtgtcatctttggaggctaattatgggacggatccctggatatggcagtctctagatggtccatctttttgtctcagctccaaactttgtctctgtaactccttccatgggtgattgtttccaattctaagaaggggcaaagtgtccacactttggtcttcattcttcttcagtttcatgtgttttgcaaattgtaccttatatctcactatactaagtttctgggctaatatccacttatcagtgagtacatatcatttgagttcttttgtgattgtgttacctcactcaggatgattccctccaggtccaaccatttgcctaggaatttcataaattcattctttttaatagctgagtttttaaccatttattttaacgtaagctttctaaggcaggagtatttccaaaatgtatttttccttcgaacaaagatggttctatcaagactattagcatattgaatgtgtgtctatgatctgaagaagtaacagtggatttacattatgatggagacacatcaggccatttgtcatcattccacatatcatagtgaagagcagcaactctaaaatgcccagaagtttaaaaactgtgtgtacatgaagatcattttttaactgattattgtattgatttacattttaaatgttgctcccttgctggttttccctcctcaaatttctcatctcataccacttcccctttgcctctatgagagtgctcccccactcccacccacccccacccatttctgcctcactgccctagcattctcttatgctgggtatcgagcctccacaagaccaaaggcctcacctcccttgatgccaaataaggcactactctgttacatatgtagctggagccatgggtccctccatgtgtactctttggttggtggtatagtccctgggagctctagcggttctggttagttgatattgttgttcttcctatggacttgcaatccccttcagcatcttcagtccttaccctaaatctcccattggggtcccagtgctcagtaggattggctgtatctacatctgtcttaggcgctgtcaaagcctctcagggggttgttatgccaggctcctgccagcaagcacttctttgcatcagcagtagtgtctggttaggtgtctgcagatgatatagatccctcggtggggctatggactattcttaagtctctgctgcattatttgtccctgcattttcattagataggaacaattctgggttaaatttttgagatgggcaagtggcctcatcccttaactgggggctgttactagatatgctctctacaggttctatctcccctttgttgggtacttcagttaatgtcatccccattagtttctggaaacctcttggttccctggcatcagggactttgtagtggctaccccagttcctcatcccccactactacatatttctgttcaactttctgatcctttggactttgctcctgtctctctctattactgatcctgcccccatttttccctcctcctctctcccaaccagctctttccctccctctacctcctgtgattattttgttctcccttctaagtaggattaaagcattcacattttggttttcctccttctcaagcttcatatggtgtgtgaattgtgagtattctgagcttttgcgctaattattagtgagtacataccttgtgtgttcttttgtgtctgtgttacttcactcaaggtgatatttctagttccatccatttgcctgtgaattgcatgacatctttgtttttaatagctgtgtagtactaccacattttctatatccattcttccactgagggacaactgggttgtttccaacttctggctataataaataaggttgctatgaacatagtggagcatgtgtccttattatatgttggaatatcttttgagtatatgcccagtagtgggatagctgagtttttaggcagaactatttccagttctctgaggaactgctagattgatttccagagtggttgtaccaggttgcagtcccaccagcaatggaggagtattcctctttctccacatcctcgccagcatctgctgtcacctgagtttttgatcttagccattctgactggtgttaggtggaatctcagggacattttgatttgcttttccctgatgactaaggatgttgaacatttctttatgtgcttctaggccaatcaagattcctcagttgagaattcttttttacctctgtaccccatttttaataagattatttggttctctgagcctagctacttgagttatttgtatatatttggtattagccctcttctgaatgtagggttggtaaagacattttcctaatatataggttgccattttgtcatattgacagtgtcctttgccttacagaagcttttcaattttatgagatcccatctgtcaattgttgatcttagaacctgagctattggtgttctgttttaagtttatgacatgagtttaatttttccacagtcttgccttagttcaatatcagagaggcatttactcaactgagattccttcttcccagatgaccctacttagtatgaaaatgaccaacagacaatcagcacaaagacatttacacaggttctcagaatgtctttaagaattcatgacaataaaatagcagcccccttctgagctatatcaatataagaaacattttcttgactaatgactgatatggccagcctctgtgggcagtgccaccctaggcagatggtactgggatgtataaatggtaacctaagcaagcccttcagatcaatccagtgagcagagttcttccatggtctctgcttccgtttctgcctacagttctgacctgaagtttctgccccagtgtctcttcattatgggcttatgagctataagattaaatgaatcttttcctctctaaattgcttttgctcattatatttctcataacaatagaaaatagtgtgtaaattcatagacatacaaacatatgaagcataagctttaattttttaaaacaaaaactatattgaccctacagtagataattatatattttgtaaaaatattttcaattttttcttcagttaacttttaatgatgttcttatgttttcatcatggataatttttatttaatcttaaaaatttctctatgaccctactttgtatctcacttttattacatttttcattattatacaggtctaaaaaaacattaattttaatatgatttttcttttgttcttgctgtatttagagtgattctgatcagcttccaaatatgcaagtgtttttcaattatattttgattattgatacagatttgcttgaaaaatcttccaagctttaaactggagacgtgcacaccctgtcaaatttatatatatatatgtacataaatatacatatatatatatgtatatttatatatgtatataaatgtacaaactgcttttttcttttactgaaaatagacactttttaaatataacataatatgattatggtttctcttccctctactcctccaagttataagaccttcacctcccatatggatccatagcccttttctgcctctcattaaaaaacaaaccggcttctaaggtataataattaatataatatgacatgacatgataaaaacaaaggtatacagataagaatgagacaaagaagcagcaggaaaagcacacaagaaaagtcacaaaaaaagggggcacaggtgtagagaccagtttttcaaatactcaggagtcctataaatgacacttacctgaaagccataatatgtatacgaatgacttgtaagttaaatttaaaaaatagtgataaattttttttttaaatccttaatgtgaccttatgagacaaagaacctccaaaactgctattgaatttactttctcttggccatctactcctggacttgtagactactttcaagattagtgtgtttctccagttagacacccttggagaaaattaaaacttcatttgcaaggggttattaattggacatggcttctatttagggatggggacatgtgtccacttctttcagctctaggaacacattggtacatacccgtgcattccctgcatatactgctacagtctccatgagttcatatgtacatcagttgtgttgtatttagaaggctttctttccttggtgtcctccatcattaatggctttttcactctctctgcatcctctttctcagggttttctgagccctgaatggagggatttgatggagacatcccatttagggctgtgtttcagtcattcactctctgaatattccttgattggtctgtgtgtttgttctaatatgctgtaggaagaaacttctctgatgatggctgagcaaggctctgatctgtgaatataacagaatgtcagtgggagccattttattgatacatctctttagcagaatagtggtattaagttttaccccatgtccctggactaccacacaagttcctagtcacccagacagtatcatctatgggttccatctcctgcagcaggctttaactcaaatcagacattgcttggttactcccacaagctttgtaccacaactgctctaacttgacttgcaataatatctccactgtagataagttttgtaactggtgtggtgtttctctttggataacatgcagcgtaccgtacatgttgagcaatggggttttaccatcagtgtgtgaagatcagcctgcagacctgccaacagcctgggtagtttgggcattctcatgggttccctttgaacaacaactctgttaactataacccagtcctgctcctggaagcttcatttggtgacaagaaaagtacaggtgtggctctgtctcccatatgatattgtgatcacctttatgtttatatatattttaggaagcttctactatattaagtttccatactaccactcaacagttccttaattttagctgttcttccatgtttccttcctcatgcccttcttccaccccactccctagatggatagtttggaacctttataagacaggggcaagcatgagaaagttagttcatttaggagcatgtttaagataggcaaagcaagtaggaatgacagattctgtctgtttattcacttgatattggagtgaaaaaaacttctgcttccactttgtgcatctggattgttaatttgacagaatttagtctcatcctagaaataaatctctggacatttgtgtgagggtttttatagagacattgacctaatgtgaaaaaagccactatgaaagtatcaccattcaatttggttgctgtctcagaacagagttgagcacccccattcatttctccctgattcttgactatgggcatgatggtactaatcaccacatgttcctatagttgtgcctttcctaccagaatgtgctatacccacaaactataagggaaaaaaagaaagactgttaaaaataatattcactttttaaagcttactccattcagtttcattgtccaggatatggtctgtctagtatatatatttgacatttttttatttcactattgttgactagctgaatcataaataagagatgataatagttttaatgatagtgtttaatattttagtatacttatggccttcctgtttacttttctcaatgttttgaaatcaactatagttttgggtctatgggtccttgaaatgctatatatttttatttcatgtacattaaaagtttaactcaatttatttttaatttaatagagatatggttgggtttaagcatgtcagttaatcgtagaatgttcatgtgttcatcattttgttatcttctacattttttttggattgattacttttatgatagtgctttctccagtattgatatatttgttgtgtctttgtgtattattcctttctgaaatagcagctttaaacaattggttaccaacctttttctttgagcatcagtgggtaactaaatacccaagctcttgagtccattcccaaatctccagtactgaagctcttagatctgtagagctgagttctgtaaagattgtatggggattgtaatagtcaaaaatggaggaattttgtcctagatgtacactatagtttgtcatgtttttaattaattatttatttacttatatcccaaatgttcctcccacctggttcctcttccaagaattcttcactccatcccctttacctctgaggggatgctaactgccacccaggcatctcccttccctaggccattaagtctctacagtgttaagtgaatcctctcccactgagaccagacaagggtgtcctctgctacatatttgtcagggaactatgaccaacctgtgttctttggttggtggcttagtctctgtgagatcccaggagccaggttagttaacactgttggtcttcctatggggatggaatccccttcagatccttcaatccttctcctaactcttccataggagtccccaacctcaatccaatggttggttgtagcagctatctcagtcaactgctggtagagcctctcagagaacaatcatgttagggtccttctgcaagcacatggcatcaggaatagtttcagagattgttgcctgcccatgggatgtattccaagttaggacaatcactggatggcctgcccttcagtctctgctacaactttgccctgcatttcttttagtgaggaacaattctggatcaaaaattttaaaggtgtgttccactaagggccttgtctatctaatggatatgttttttttttcaggttcccatctcctgctcactgttgggcacgttggctaaggtcacccccattgagtactgcaagcctctcatatattctactttaaccctcttttatccctttaagtaataccatcctctcttcattcatttttctggtactgtcacttacctggccataaacctcattcttagaatttttttatttgttttcaacagtcaataaagtgttgaagagattaaaaactatacaaaagtgaactgtacatttatctatatgttaatgtggcctgatccatccagaatttatcatgcctactgctaaatctaaactaaactgtttctattctgtgtctttttttcacagccaatgctctgctgtgtcaggttgacaagtacagctaaccagaataccattggataatattttgcttcttcataaagaatttcagataactttccttataatagtggttttctttcagtaaattcaggttttgctagaaagctttcgattctgttttgactttcaaagacattcctatgtagatacagcttattacacaatatttggaattttgctttgttggcactttcagatatctggcactctactacttcctgatatgtttattttgaagcaaatgcctattaccaacttcacattttgtcctctctttaacatgcatagtatatggattttatccctttctaggtactgctcaatgtttctctttgttgtaccttttcagcattttcttaaggtccaggagattcttggatcgatgcattgggggggggggtttacatcaaatttgagagatgctttgtggaaaactattcagctttgtccaattcttaaattctgtcttcgctcccattggtatagcagttacacacgtgttaaaacagttgttatccataagactgctggcaatatttttcttagtctttgtggaatttgatttggatagattctaatgttatgtctcccaatttatttctcctttctttgtcaatgcctgttactatattatgaacctatctagttcactaaccacttagaaattgtattaaatccttgaaatgtaactatgcattttaaacacatctttcctttctcttttaaggaaacacactgtccccccattttgaagatggctgccttccttctgtcccttcagatgaccttgtttttctgtttgcacacaatactagcattcaaactccctctaattatcctacttattgtacttgagctcatacttcctatttgattttgacttaatcatttcttaagtgccctatgtccaataatagtcacattttgaagttatgacagtaacgtaagcgtggagggaaacaaatcagtttaaaaatattcctgggtaggtactatctttcttttagatttctgagagagggtgtatgtgagagagagaaggaggggtgcgtgctcagtacatggtgatacactcacctgtacacacagctctttctgataacatttaagtgcctgcctattttaaggtttggccaattttaaattattttcaagtgtattgggcttgttacaccatgaagctccactattttggttcaatttgttctttaaaaggaatgcctgctttgtgatttcatattatagacttggatcagcttgaagtctatggctaattttaacatctccactacaaaaaaggggatacatagaggaacactaactagggattgtgaggtcttgtggttttagaaattcctcgaaagagtttaacctattaatctcttgtagtccttgaccaaatttatgtggtttctttttttttttttcatataaccctatttctttttcctgccaaggacttgagatttctcctttccagcactttggctcttcttgctgtatatttctcatctctttaatctgtcacataattgataggtgctttggtctcaaaaaactcatttgtgttgttattcttgttgctttggtttggtttggtttggtttggtttggtttggtttggtttggtttggtttgatttgatttggtttggtttggttggtctctttaacccagtgatacttttgtagttccccacataattctttgacatacagtttgttgccaggaacaagaaaggtaaatgtaggtttaatttgttttcttgatattttttccccattatagtatgtgttcagtttctgaaatgcctgcttcacatatttttgggatatttgacagatagatatatggatggatagatacatagatagatagatagatagatagatagatagatagatagatagatagataatatagataaaatgtttgagagttttatgcatctataaagtgtattttgatcatagtttactccggctcctcctaacttctctcagagtcccatttccctcacttcacatcattttaaaacaacaacaaaatccagtttatactgtcttcatacaaatgtgtaggatggaaacctaccaggagccagacccttaagaaagctgtctatccctcctcagtatccttcaactgtcgttaactcttcagttcagggtggtgtctcttgaagcctccctccatgcttcagtgctgactttcctgttcttgtgtaggtcttgtgcagacaaacacagctgttatcatgagtgtaacagtcttgtcatgttcagagattttcactacagctctccctatactctggtacttaaaaatcaccccttcttccatcatggtcccatagccttaggtagaagatgtgtatagatgccacatatatggaagagcacttcacagacactaactatctgaactttgaccatttgtaagtttctacattaacaacaacctattgcaccattttcttctgagttctcaggtctgaactaattatggttataaagatatcaacttagtactatgtccatttagcagaataattgtaggaagttcacccctagagcctgttagcttccctgccatgtcttcttatgcagatgtagagtacaaggcatgcattttgcctttgaagtaggttttaaacttaatcagaaagcagctagtttcgcataatatttttgccactagtaaccatgggcatattttacccattgattcttattgtagatctcagtgttcgcagttgggtaagactcttaataacatttatgtccagcaggctacatagaatcattttggaagatgaaagatacctatgaaggcgaaagcttcctcatcaggagcaacttgacttctctatgtcctgtgacaaaagtgtatagtgtcttcagtaataatgtcttactgtcaaattctggtggggcaccaaggagtgtgacaacaacattcattgtttggtagtctctggaatagccctgtacagcatctcaggaaaagctacccaagcctgattccaagtttttcatttgtcatcctgtggcttcttggagatgcataatgtcctgtgtacagtaataacaattaaccgtaaaattatatgtatgggtaggtaaagtacatataatagaaggtttctcataattgcaggtttgaagatcaaggtcaggactttgtgcctgcaaggaaacagcacttacacagaggtgcacctaaggctctttctttcttctctaatggaaaaggatatctccattttaccatcatgactttaaagaaatgttgttttcatggttctcctttaattttttaagtgaaagtcaataaaaaatgttttatctggttatacaagtttaaataaaatggggtctttgtcttcggctcccaattatgctgaggtaatgagagcatactgcatttgtcttcattgagataagaattaaacatttgttatcacaaaaggaagttagtacatatcaataaaccttagagcaaaatcaattctacatatttaattcttgaattttatttttcctatttgttaaagatacattttgttttctgttttgttttttgtttgtttgtttgtttgggggggggggtcaagacagggtttctctgtgtagccctggctgtcctggaactccctttgtagacaaggctggcctcgaactcagaaatccacctgcctctgcctcctgagtgctgggattataggcgtgcgccaccagtaggttttatattacataataataagagtccatttatcatttctcatgaacacagcagtgcaaaaactaaaaatgtatatgtagatgcatgtgtgggtttttttttttcaggtgcattaaaatgttggtttccaacattgataatcattctgtctctgtctctcagtgtctctgtctctctgtctctgtctctcatgaaactcaatgtgaaaaacttagaaaaattttttataaaatacaaattaaagatttggcatctgttcactctcttagtgtggttaccagtggcatgtggggataatacaaaacacactgcataatttctagcagccaatttatgcccatagttacattttttcctgaatccaactatgaatatcataattggaaaatggttttaagatgaaaaggaacaagaaattaactttgcaaatactttaaacccgtgctcatacagtaggcttcttgtcctgttctgccaaattttgtacctgatttcctacttctcttctctttccaggaaaacagttggagttttctgctgtggacccagttctatttccaagactcttcatagtttgagtaaccggaacaactcatatgggacaaaatttgaatacaataaagaatccttcagctgaaaccttaggagactactggggactttaaagaggaacaagtgcaatttctaagacttagaaactcagctgaatcaaacagctgtgctatgccaaagaataccaagggtttgctatttatgattatttaaaatgagaattcagaaaatgtggcaaaatggcatggttaatctgcgagccaaaggggccctgaagaatatctgatgtggtgattcacattttgatgagcaaattaaaagaatgccgttagacgcacgctgttgatttttatgggaaattcaagaagtctcttacaaggagctgaactcacttacactgaagctgatagctgcagccctctttaaattgttttcggttgaacacattcaagattgaacaaaattaaaaattcattgaaactcagactccattttctaggttgtgcataagtggagtagctttcatttggataggctccaggcaaacactgggaggttgaaactgtagcacaaaactttgtatcgatacgggtacttcatatctgctgcttcactactgactctcctgcctcgctgcagtgttcctaatctatatgctcacaaagcttatacccatgtggatgtagtatctacttatgtttgcatcttatcctccgtctaggaaaatctgctcccccttagccaatcttggacacaattatttaatagaactgtttgatcaccgatttgttcaatttagtcccatggcttagtaatgaaaatgtgctttaagcttatccttaaaaaccaaagagctttgtatcttgcaccaaacacagaagcacaagacctctctcctttgactcactttgatttcagataagagatgctgaattcatggagtgataccctgctttgctttctacaaaagtagaacttcttcagtatttattcaaatttcagtttagaatcactaatattatttttgcactgtttgatatcacggtgagttactagatttaagtcccctgttcatgtgatccaatcagtttatcacctattttttaatattcaggaatcagaaggaaaatttactaccttaagaaagaagatattcatacagtttatcaacttaatttggtatataattattaatgctatcaaataggacacattgctgaaattagtaccttaacttatgcttggtaatcttttgtatatcacatgattacaataaatcctgttattatttggatttcatgtgattcagtactaacagacaagcatactaaaacatttagcatcaaataaccacctgtatatttagttacacatatattttttttatccttggaacactttcctatccctcctatgggcaatgtgcaatgctcatgtagactgaactgtggagacataaactatgacatcatagcaatgctgtctagattacaaagagttttcacaaaacacatactacaaaaataaaaataaaaataaacctcataaaaaaaaacttgggcttgtccaggcttgatgtgcaatactgattccttaccaatcataacttatttttatgcctatgtgaattcatcacatttcaaaaattcaggtcaaacttacaaaacaagatgatatttcagacttgtgtgctatgttgagtgaacttccttgcctaatctaaactccagtgcatgttcaaggatctatatgttaaacatggtatatttttgaacaggaataaattaaagctttatcacacatatagaagacagcttcatttctttttagattctatggtggtggttactgttgtataaatcttaaatcacgaattttgatggtaataaatattaaaattaaaatggtgtctgtggaatttctataagtttacagataaattagtaattccaaggagaggtggttgttggtttgtgaaaaaagaaaaataattgaaggagtactgcctaactacacactggcataataatcttgagaatgtgcattctacagctgttaatgtcatagtccagtcatgtgaatgcggcaaattacttctcacactggccattagattttgcctttgagcctggtgaggaatataaaatagtacttactttctcaattgttttgaaacaaagcctcatattgaatgagtcattctcaaatttgctatgtagccaaagatagccttgcactttgtttccttctgtctcttgtttcccaagttttagaattataaatacacacatacccaaatattaattatcttatgtaatatatctttttgagaaaataatggaattgtatgacatatagcatactggatgtaattttgggacacaagaattctcaaatagcaagatcatatatttaagggactatagaggtcataatttctactataggtttctctccatgtatattcctttttctttaagaaattattagtttttaggatgatactataaaattcattttgtagataaaatctaatttatatgcctctaagcaaagaattcagtaaaactttaaacaagtttttaagttgcttctcatttaggtaaagggaagagactgtggttttacatatatctaagaccaaaaactcagaatctatatctatatctatatctctatatatatgcacatatatatgtgtgtgtatgtatatatatgtatatatgtgtgtgatatacatatatcatatgtatatacatatattatgtaaatatgtacacatatataatgtatgtgtatatgcatatatgtgtatgtacatgccatagtagataggtaggtaggtaggtaggtaggtaggtaggtaggtagatgatagatagatagatagatagatagatagatagatagatagatagatagatagataatggatatgtgtgtgtgtgtgtgtgtgcatgtatgtgtgtgtgtctgtgtgcatgtatgtgtgtgtgtgaatgtataccacatgtgtgccttttgactatggatacagaatgaatcagatttcatgaatgtatgtatgcatgtatacagagagagagtgagaaactgtatttatccagatctttaagatttagttctcttcaagattaatgtcatataggaaagaaatgctacttaattgatttattgacaatatgactgtgaaaacactggcattcttaaaaaacacaataacacaatggacaaactatatggtgaaatgttttctgcacactgtatgattatgacttaccaaatcaatgattccttgaagcactactggaaaaaaaaattaatacatttaaattaaaggaccctgctcaagactcattagagaaaaaaaggtgacattgtcatcagttgataggtagatataattgttacactgatgttaaataatgttcattatattaaaaatatttttattttttattttaatttttatttattctctttatatcctgctcattgcccccctcccagtcacacc

SEQ ID NO: 2 - DNA, 3873 bp, Mus musculus
gtggggaggcaagggagcagcgcggtgggagccgggtggagacctccagccaggcctccagactcagtacagcctttgaccctcgcccccacgccgctcccctgcaggcggcgcccctggatctgctgccccggccactgatcgctcctttcggtcctgagcaccgagcagggcgcagcactccccgcgccggcggcatggcggtgtcctggaggagctggctggccaacgaaggggttaaacacctctgcctgctcatttggctgtccctaaacgttctacttttctggaaaaccttcctgctgtacaaccaagggccagaatactactacattcaccaaatgttgggcgattgtgtttaagcagagcatctgcatctgtcctgaacctcaactgcagcctcatccttttacctatgtgccggacagtcctggcttatcttcgaggatcacagaaggtccctagcaggagaacaagaagattgttggataaaagcaagactctacacatcacatgtggtgtaactatctgtattttctcaggtgtgcatgtagccgcccacttggtgaatgccctcaacttttcagtgaactacagtgaagatttccttgaactgaatgcagcaagataccagaatgaggatcccagaaagcttctcttcacaaccattcctggtctgacgggtgtctgcatggtggtggtattgttcctcatggttacagcttctacctacgcaataagagtttctaattatgatatcttctggtatactcacaacctcttctttgtcttctacatgctgctgctgttgcatgtttcaggtggtttgttgaagtatcagacaaatgtagacactcaccctcctggctgcattagtcttaaccagacatcatcccagaatatgtccataccagactacgtctcagaacattttcatggatctttgcctcgagggttttcaaaattagaagatcgttaccagaaaacacttgtgaagatttgcctggaagaacccaagttccaagctcatttcccacagacctggatttggatttctggacctttgtgcctttattgtgcggagagactttaccgatgcatcaggagcaacaaacctgtcaccatcatctcagtcatcaatcatccctctgatgtaatggaactccgtatgatcaaagaaaactttaaagcaagacctggccagtatattattctccattgccccagtgtatcagcattagaaaaccacccatttactctcacaatgctctgtcagaaacgatggcagccctggcacagcagagtatggatatacagtttctttgtctgtagtgatgctgcatgccatgaagatacttccaagatgaaccatgccttcttactgtgtcctactgaaaccaaagcaacatttggtgtccactttaaagtagtaggagactggacagaacgattccgggatttgctactgcctccatcaagtcaagactctgagattctgcccttcattcactctagaaattaccctaagttatacattgatggtccatttggaagcccatttgaggagtcactgaactatgaagttagtctctgtgtggctggaggcattggagtcactccatttgcatcgatactaaacactctactggatgactggaaaccatacaagttaagaagactgtactttatctgggtgtgcagagacatccaatcattccagtggtttgcagatttactctgtgtgttgcataacaagttttggcaagaaaacagacctgactttgtgaacatccagctgtacctcagtcaaacagatgggattcagaagataattggagaaaaatatcacacactgaattcgagacttttcattgggcgtcctcggtggaaacttttatttgatgaaatagcaaaatgtaacagagggaaaacagttggagttttctgctgtggacccagttctatttccaagactcttcatagtttgagtaaccggaacaactcatatgggacaaaatttgaatacaataaagaatccttcagctgaaaccttaggagactactggggactttaaagaggaacaagtgcaatttctaagacttagaaactcagctgaatcaaacagctgtgctatgccaaagaataccaagggtttgctatttatgattatttaaaatgagaattcagaaaatgtggcaaaatggcatggttaatctgcgagccaaaggggccctgaagaatatctgatgtggtgattcacattttgatgagcaaattaaaagaatgccgttagacgcacgctgttgatttttatgggaaattcaagaagtctcttacaaggagctgaactcacttacactgaagctgatagctgcagccctctttaaattgttttcggttgaacacattcaagattgaacaaaattaaaaattcattgaaactcagactccattttctaggttgtgcataagtggagtagctttcatttggataggctccaggcaaacactgggaggttgaaactgtagcacaaaactttgtatcgatacgggtacttcatatctgctgcttcactactgactctcctgcctcgctgcagtgttcctaatctatatgctcacaaagcttatacccatgtggatgtagtatctacttatgtttgcatcttatcctccgtctaggaaaatctgctcccccttagccaatcttggacacaattatttaatagaactgtttgatcaccgatttgttcaatttagtcccatggcttagtaatgaaaatgtgctttaagcttatccttaaaaaccaaagagctttgtatcttgcaccaaacacagaagcacaagacctctctcctttgactcactttgatttcagataagagatgctgaattcatggagtgataccctgctttgctttctacaaaagtagaacttcttcagtatttattcaaatttcagtttagaatcactaatattatttttgcactgtttgatatcacggtgagttactagatttaagtcccctgttcatgtgatccaatcagtttatcacctattttttaatattcaggaatcagaaggaaaatttactaccttaagaaagaagatattcatacagtttatcaacttaatttggtatataattattaatgctatcaaataggacacattgctgaaattagtaccttaacttatgcttggtaatcttttgtatatcacatgattacaataaatcctgttattatttggatttcatgtgattcagtactaacagacaagcatactaaaacatttagcatcaaataaccacctgtatatttagttacacatatattttttttatccttggaacactttcctatccctcctatgggcaatgtgcaatgctcatgtagactgaactgtggagacataaactatgacatcatagcaatgctgtctagattacaaagagttttcacaaaacacatactacaaaaataaaaataaaaataaacctcataaaaaaaaacttgggcttgtccaggcttgatgtgcaatactgattccttaccaatcataacttatttttatgcctatgtgaattcatcacatttcaaaaattcaggtcaaacttacaaaacaagatgatatttcagacttgtgtgctatgttgagtgaacttccttgcctaatctaaactccagtgcatgttcaaggatctatatgttaaacatggtatatttttgaacaggaataaattaaagctttatcacacatatagaagacagcttcatttctttttagattctatggtggtggttactgttgtataaatcttaaatcacgaattttgatggtaataaatattaaaattaaaaaaaaaaa

SEQ ID NO: 3 - DNA, 3760 bp, Mus musculus
gtggggaggcaagggagcagcgcggtgggagccgggtggagacctccagccaggcctccagactcagtacagcctttgaccctcgcccccacgccgctcccctgcaggcggcgcccctggatctgctgccccggccactgatcgctcctttcggtcctgagcaccgagcagggcgcagcactccccgcgccggcggcatggcggtgtcctggaggagctggctggccaacgaaggggttaaacacctctgcctgctcatttggctgtccctaaacgttctacttttctggaaaaccttcctgctgtacaaccaagggccagaatactactacattcaccaaatgttgggcctaggattgtgtttaagcagagcatctgcatctgtcctgaacctcaactgcagcctcatccttttacctatgtgccggacagtcctggcttatcttcgaggatcacagaaggtccctagcaggagaacaagaagattgttggataaaagcaagactctacacatcacatgtggtgtaactatctgtattttctcaggtgtgcatgtagccgcccacttggtgaatgccctcaacttttcagtgaactacagtgaagatttccttgaactgaatgcagcaagataccagaatgaggatcccagaaagcttctcttcacaaccattcctggtctgacgggtgtctgcatggtggtggtattgttcctcatggttacagcttctacctacgcaataagagtttctaattatgatatcttctggtatactcacaacctcttctttgtcttctacatgctgctgctgttgcatgtttcaggtggtttgttgaagtatcagacaaatgtagacactcaccctcctggctgcattagtcttaaccagacatcatcccagaatatgtccataccagactacgtctcagaacattttcatggatctttgcctcgagggttttcaaaattagaagatcgttaccagaaaacacttgtgaagatttgcctggaagaacccaagttccaagctcatttcccacagacctggatttggatttctggacctttgtgcctttattgtgcggagagactttaccgatgcatcaggagcaacaaacctgtcaccatcatctcagtcatcaatcatccctctgatgtaatggaactccgtatgatcaaagaaaactttaaagcaagacctggccagtatattattctccattgccccagtgtatcagcattagaaaaccacccatttactctcacaatgtgtcctactgaaaccaaagcaacatttggtgtccactttaaagtagtaggagactggacagaacgattccgggatttgctactgcctccatcaagtcaagactctgagattctgcccttcattcactctagaaattaccctaagttatacattgatggtccatttggaagcccatttgaggagtcactgaactatgaagttagtctctgtgtggctggaggcattggagtcactccatttgcatcgatactaaacactctactggatgactggaaaccatacaagttaagaagactgtactttatctgggtgtgcagagacatccaatcattccagtggtttgcagatttactctgtgtgttgcataacaagttttggcaagaaaacagacctgactttgtgaacatccagctgtacctcagtcaaacagatgggattcagaagataattggagaaaaatatcacacactgaattcgagacttttcattgggcgtcctcggtggaaacttttatttgatgaaatagcaaaatgtaacagagggaaaacagttggagttttctgctgtggacccagttctatttccaagactcttcatagtttgagtaaccggaacaactcatatgggacaaaatttgaatacaataaagaatccttcagctgaaaccttaggagactactggggactttaaagaggaacaagtgcaatttctaagacttagaaactcagctgaatcaaacagctgtgctatgccaaagaataccaagggtttgctatttatgattatttaaaatgagaattcagaaaatgtggcaaaatggcatggttaatctgcgagccaaaggggccctgaagaatatctgatgtggtgattcacattttgatgagcaaattaaaagaatgccgttagacgcacgctgttgatttttatgggaaattcaagaagtctcttacaaggagctgaactcacttacactgaagctgatagctgcagccctctttaaattgttttcggttgaacacattcaagattgaacaaaattaaaaattcattgaaactcagactccattttctaggttgtgcataagtggagtagctttcatttggataggctccaggcaaacactgggaggttgaaactgtagcacaaaactttgtatcgatacgggtacttcatatctgctgcttcactactgactctcctgcctcgctgcagtgttcctaatctatatgctcacaaagcttatacccatgtggatgtagtatctacttatgtttgcatcttatcctccgtctaggaaaatctgctcccccttagccaatcttggacacaattatttaatagaactgtttgatcaccgatttgttcaatttagtcccatggcttagtaatgaaaatgtgctttaagcttatccttaaaaaccaaagagctttgtatcttgcaccaaacacagaagcacaagacctctctcctttgactcactttgatttcagataagagatgctgaattcatggagtgataccctgctttgctttctacaaaagtagaacttcttcagtatttattcaaatttcagtttagaatcactaatattatttttgcactgtttgatatcacggtgagttactagatttaagtcccctgttcatgtgatccaatcagtttatcacctattttttaatattcaggaatcagaaggaaaatttactaccttaagaaagaagatattcatacagtttatcaacttaatttggtatataattattaatgctatcaaataggacacattgctgaaattagtaccttaacttatgcttggtaatcttttgtatatcacatgattacaataaatcctgttattatttggatttcatgtgattcagtactaacagacaagcatactaaaacatttagcatcaaataaccacctgtatatttagttacacatatattttttttatccttggaacactttcctatccctcctatgggcaatgtgcaatgctcatgtagactgaactgtggagacataaactatgacatcatagcaatgctgtctagattacaaagagttttcacaaaacacatactacaaaaataaaaataaaaataaacctcataaaaaaaaacttgggcttgtccaggcttgatgtgcaatactgattccttaccaatcataacttatttttatgcctatgtgaattcatcacatttcaaaaattcaggtcaaacttacaaaacaagatgatatttcagacttgtgtgctatgttgagtgaacttccttgcctaatctaaactccagtgcatgttcaaggatctatatgttaaacatggtatatttttgaacaggaataaattaaagctttatcacacatatagaagacagcttcatttctttttagattctatggtggtggttactgttgtataaatcttaaatcacgaattttgatggtaataaatattaaaattaaaaaaaaaaa

SEQ ID NO: 4 - DNA, 268001 bp, Homo sapiens
aataaaaaataaagtatttaaaccagttctcactgatatcaaagtccattgtctctcattaaatgaatctcatatttaaaaaaaaaaaaccttaataatttactgagatgaagcattcttaggaaatttaataagcaaaatattcagataaaaattagtatttaagtcaagcatttctgtgcaacacatcaacccaataaagtggtttaaaacaacaaattttctttttttttcttttttttttcttgaaatgaggtcttattttgtctcccaggctggagtgcagtggctctattaccagaaaggggtcctgagccagaccccaagagagggttcttggatctcacacactctatgactccatagagtaaagtgaaagcaagtttattaggaaagtaaaggaagagagaggggctactccataggctaggcagcagcataggctgctcagctgcttatacttactgttactttttgacatatgctaaactagcagtggattatttatgagttttccaggaaaggggtgggcaattcccagaactgagggttccacccctttttagaccatacagggtgacttcctcatgttgccatggcatttataaactgttatggtgctagtgggagtgtcttttagcacgctaatgcattataattagcacataatgaggagtgaggacaaccagaggtcacatttgttgccctcgtgattttggctggcttgggctggcttctttacaatatgctgtttcatcagcaaggtctttgtgctctgtaccgtgtgcggacctcctaactcatctgcaactaagaataccttaacctcctgggaacgcagctggcttcagccctattttacccatcccctattcaagatagagtagctttggtttgatcgcctctgacagcatgattttggctcattgcagctttgacttctccccggctcaagtgatcctcctgcctcagccccccaagcagttgggacaataggcacatgccaccacacccagctaatttttgtattcttcttgtgtgtagagatggggtttgccacattgcccaggctggtcttgaactcctgggcacaagctatctgcctgcctcggcctcccaaagtgctggattactcgtgtcagtcacagtgccctgcccaacaacttttaattatctctcatgcttctctatcaattaggtcctcagctgagtcgttctgctatattgcatcagatgtcagctggttctgcagtcatctggaggctctgctggtagaactcccagcacacttcactcaaatggctggctgcagctggtgctagttatggtctgggatctcagatgaggctgctaagccgaatgtgttgttactcctttacatcgtctctccacatggcttgaacttctcacagcatgcctgctggattcgaagagatggcattcaagtgcttaaaaatgtaagcaaatctcttaatattcagtcttagtattacatagggcttctactgccatattctctggttgaaaacaatcattggatcagcccaaactaaaggggtagagaaagaaattccacttctcaaggaaggaatgacaagttttgggccctttttaatcaacatccaagtaagctgcttgtgatgaaagtgaaggtggggaacggaaaaagtgggaaggtaaagatcaaagcaaaatgctccagagtccttaaaaagctaaccgtgtaagcttggattccaagagagagactccagatggagctaggaatagaaagatttcctagtaattgggagcaaggtagatgaacatttacagtttctcctaatttctgtagtcaggcttcaggtacaaacttaggctaatatgttgtctgttaattatatgtatttcttaatcatatattggctgaggagataccttgggagggttgagagggaagataactgagagatggtgatattgctaatactaccgatatacgggacccctctgcaattacatcttttagttaatttcatgtgtatatattcagccattgacagtataatctgtatcctctgtgggtaggagccacagcactgtatttatttcgcattctcaatcacgcctacagattcagttcattcagactgttgtaaaaataaatgcggctcaaaaatgcagctcccccatgtaacctcctaggcaaaaagagacagaataaaatcagccaaccattttttcacaaagattgctgcctagtaatttcagggaataaacttttagttaataccgtaagtgcagaggcctgcagcatacacccaggtgaaaagtttcaccccacattgacctgtcttagggagaggcaagcacttgctgaagaagcaagttctcattactaattagtaattcattattgcatggtttcaagggaaacttatgacctgttaagactaaaaatgaacacaatcattaatgtttccatcactttggaataggaaacaatttcagtctaaagtgcatgatttctggaatgtatttctcgatgcttctgttttttgttataatatttcttgaaagcctggttaaaaaaataaaaatagctatgtttagcctaaaatgattacttttctctgccattgacaatgaggtagcatttactacaaaattggcattacatgttctttgctatgaacataactttatttgaatcaaaaaagtcaagcaacaaaagtttaaactcatttctttgaattttgacaagggtgtaaaactgggataattttcattaaatgtgttatacatttagcagagtaaaagcaaataagtatttattcactactgagaaaattacaaattataatcatgtgggatcctaacaccggaatagaaaacaagagaatagattataagaaataataagaaaaacaattgggattttttcccccagaaatctgggggcaagtgttgcaatgagaaaacataaagttactgattattgtattttattgtcaaatatcatcttaagtcatattgaaaatgtggccatctgttctccagtgtcttcaaaatctaagaatagcccaatcccaatcctttcaaaaacattctaaaaacaaaggatgaaaattatttatattggtagagatagatattttaattgaaatcagtttataaatatataacatttgataaatctgaacacataaaccatttttaactattataaaattattgatttctgcctccaaaattccagtgaaattgtccctaagccactaatcccatggttctattggtttatggcctgtttgagacattttgcttctcttttccactccctcttacaattttttattcccttggctttgtgggcacctctatgccctggtagttttcctcccctctgattgcgttcatctggaacgcaatcctttccctctcccacctttgttccacatgtctgtttcaaatcacccattcctattaataaactcattataacttttgaatctcagaatctccatccctggactatctgaaactcgccattttaaaattcagtacattatcttcttacaaaaaatgttttccatctccttaattaatgtacctatatagcggcatcaccattttaatagtctccttggaaagaaatctaagccatcgaggtgcctctatcctctcccttctatgttactgcatccaatatattaaactctcacaattcagtttctggcatttgtcttgaattcattctttcttctctgaccccatagggtgccagccctccattcagtctttttcctcaacaattctgattattttttctgtgtctttgctcccaaaagttgccttttttatcatcttgggagcttcctctttataatatgtacactaggacataaaactaaataaaatctctccattttctaagaaaaaacatacagattccatagaatccgtgcaatagctatcagtcacctaattgctagtttcctctcctaacactcccagtcctttcacctttgttatctaacattagaggaccatgccaactgaagcctatctccatgtcaatgtacatgatttttcttcctcctgaaatattctaaaattttcccacctggtaaatttcagattactctttaagacccaggtgaagtgttgttttatctgcaaagagtctcttaaggaagttcattctctcctatttgctataatattaatttgaacatttctttattattacctgatgttgcattgtatttatgaaggatgattgtatgcatgaaggattataccactaaacttcagcttcttgaagaagtagtccatttcttcttgatctttatattaccagtgccacaaataagcactaagaatacttaaatgagttacttgcattattttgcataatgcactttagtgtttggcaggcctatactcaaagctcactctgacacttagttgggtgattcaattacctaatttctcaaaatcacatttgcctcatctgaagacattggtacctacctcacagagttgttgtgagaactaacattatataatgcatgtgaaatacttagcatagtgtctgacacttaataagtactcaataaattctgactgctactattataaggcttcagttgaatagaaaaggaagtagagacagatgaaatagaatggtttgggataaaattgagaagtcaaaggaatgaaagcttaattaatttgagtgatcattttggtagagataaaggaatgagaataactggaataaaaggaggttgtagtgagagagtgttataaattattatattctgtcagcagtttaatgttctgctctagagcactgcattttgatgacatgatccaaaatactgtcataagtaagggtagacaagatggattgtaagataatcagagttgaggtgaacaagaaattaaatgttgtgaaatattattgttgaatttggaaatgtttatattcagtgattgtcatagaaatttcagatagtagataggccttgggttaagaggaatagtgtgaatcagtcagcagattctttaaaatatgttcaggagtgaccaagaaattggtaaagaacagtgatgtgaatgggttaaaggatgacttatacaaggatgggagtacaatgaactggaaagttagatttgtgactcaatcgtttgcttttgtgaaacaaggcatacgggaggatggacactctctactgtaaagcaggggctgatcaccaaggcccttaaatctggcctgctgcttgttttgtaaatgaagtttcattgaaacacagcaacactcattaatttatacattgtctgtggctgtttttgtgctgcagtgtcagagttgattaattgcagcaaaaaccatatggcccatgaagcctaaaatatttactatgtggccttttatagggaaagcttgcttaaccatgttctagaagtttgcagccaaatcagtgtcttctaatatatgctagggtataattaatgcaaggaattagaaaagaattttgtgtctagttgagaacatgaagaggagtttaccacaaacagtggatttcagaaggtctggtgaattttaagagaggtaagaaaggaagcaggagaaattgaatgtgtccaggaggagcagcattgagcaatatgagagtggctcctagaaggtggtcaaactgaaaagcttatctttggggcagtgactaagaatttctaagcataactaaagaggcctaatgacacctaaagaatcatggtgtcaggttctataagcgccggtgtaagctaatgcctcaggtgatgccagatacctgacaatacaaaattcgcccacccaataatggtgaggccctggttgggatcctaagcctggggacattactgcataaatagaagtaattataccaaaaacaacttaacacccctaggctacaagtccttgtatatcccaaggattgctagaccacaaaccaaaaatgaagacaatcattgtatatgagcaatctatcatttcatttcacagtatagcatctagatagatagatgagtgatagaatgatctctctctacatgcagaaatatatatcaatatatgtatatacattatcttatctatctttagtcattctttttcaggtagagaattctagatgggggaatttcaatgctcaattcttgaactacacatttttacttaggacaaaggaaaataggctgtactttttagaatataaaatattcatcatttcccaataagcattatagttaccacagcctgcttaaagttgttcattgttaactgacattcaaactgtttggatttcaagtgaattaaactgtcaaagctcagcagtatatttatcatctgtgctacacacacaaatttatttaccacacacttcaaacatctgttactacattttaatagtagttgttgacatgacagagtaaaaaagtaaaatgagtccatttaaaaggttgattatggtgcaaaactggtaaaaatgtcatgcatgtgtatatccttcaaagatatctatgagcacagggaatgtgatcggggcagcaaatttaaatccagaggtacagaaacacagtgagcaaccttcggtgatatataaagactcatatttagttttcatttaaggcctagataattcctgaggagaaaatgacaatacaatgtaattctcttattgcaaagtaataagagaaatgaatataaagttctgcctgagggaatgagaaatacttcacaaagaatcaaatttttatcctaagaagaatgagtaggaattcactacccaagaggagagactgtgtttggcttgccttactgttacgatagtaacagaaggaaagtaagaatgtgaaagtcaggtaatttttcaaaggcatcattgattttaaccattactcaatttcagatatacattcagttgtgtgttgatacaaataattatttacctatcttttattggttgcattcatttatccattccttttaaaaaatatttattgaaccactgccatgtgcgaagtgcagtagtagtcctgggtaaacaaagatgtgaaccttggaacgtttactcaggtaaaaagacagaccttagagggatcagtgcaattcctggagtaatgttaccacagagatgtggtaatgttgtaatgtgtaatgttatcacagggatagtaatgacagaagtttttcccattgctaggtgggaaagtcttaattaaggggataacttattatagcaaatccacaaaagtataatttttgtaagaaaattttttatgctctttttaggataaatctttgatagtaaccaggctgacagacaaggcaaggaaaactttctgtttgttgccactggaatggaagcaataaagatttttcaaatatgttgcatagcatttcaatgtggaaagggaattagtttagctaatccattttacttttaaagagttataagattactgcacttatcccattcaagaaagaaattattgctgacctctaaagtctcttccaacactgacagtctgttagttaataaccattggaaatgttaaaaataaacaatattaagtttcacctgagtttatgcagtgctgaggacaacgcttttttttttctcagacatcagaatgggttgtggcagaaattcctctcttatttctccaagacatcttatcatatttgtaaaagtaattaacttcaagtacatattttctgatcattttggccattgtttgtaatgtaaaaagataaattatactgctatgctatataaaagaataaaagaagtggtgttattttgattgtgtatttttaattttaaaatgtagattattttaatgttatattcagtaatatttttgaagttgcttgtatgtgattcagttatttatagcaggctaggaccagacctagaacaaaatcttcctgtataggaggaacaggcgctgcttatagaaactgaatagcagatgctgaggggaaggacagtctgaaggacagaatgcagtattcagagcagtgtcctgataaggaggtttgaggagggcatagagacaaattccaacagcagcattcaggattccaggagaaacgcctgaaggacacctgtcagcaggtagctcactggattgcaggcactggcctgagtttcaacgttaaactttaagcagggaacctggagaagcaaaataagccacagtcttagagaagctggggtcacagacatgtcacaaagactttttaggcacaagaaacaatctaaatatccagttaccaggtctagtatattgggaggacagtgagttcaaagaaaagcagtagttcaaagacaagttttgtggggaatagggaatccttgtacactcttggtgggaatgtaaattagtgcagctatgatggaaaacagtatggagattcctcagaaagttaaaaatagaattatttgatccaacaatcccacttctgggtatatattcaatgaaattgaagtcaggatcttggagagatatctgtactttcatgttcattgtagcattattcacaatagccacaatatggaaaaaacctaaatatccctcaacagatgaatggataaagaaaatatggaatatatagtgtgtgtttacatgtatatatatataaaatggaatattactcagccttaaaaagaaaggaaatttgctatttgtgacaacatgtttgaatctagaggacattctaagtgaaataagccaggatgaacactgaatgaccccaacttttatgaggaatctaaaatagtcaacctaatagaacaagagactagaatagcagctgacaggagctggagggagggagaaatggggaagtattggtcaaagggtacaaaattgttttagtcatgcaagatgaataagttttggatatctactgtacagtgtatggcctgtggttaacaatgctgtattgtatacttaaaagtttgctttcatggatagatcttatgtcaagtactcctgcaaaagaaataaaaaataaataaaggaaacttatggagatgatagataagtttatggcatagattgtggtcatgattttatgggtgtatagttacctccaaacttatcaagttatatgcattaaatatgtacagcattttgtatgtagattatacctcaataatgtgggtattttttaaaaaaagcagtaatatatttattaggggcttagtctctttgaaccatgacattttaattccttcccttgtcccttccctatcaacaccagatgtctgacgtggagtccaatcagaggtagtaagtcagtggttattagaattgactcagattcgagtattttcaaaccaatatttctaagttctcaaaattatattaaaagtgtttaagaaaaaggaaattcaattattcattaataagcatttatagttcttacactgtgtaccagttatatattaagtgctgaaaataacaagatgaataaaacatgacatctgtccttgagaatctcacagtctagaggacaaaaggacctgataaagtgtaatgcagtaaggtaagttctgttatcacaaacctgaagaataaccttgagttttttaagggatagctcttgctcagaaactcttaatcgttttaatatctccccatctattgctaactgaaaaaggactatgctttatcttgctgtcaatccagcacatgccttacccacatctaccatttccataagaattctcccctccacttcatactcagattcttgtgatctaaccaaattactggcttacctgtcaaccctcagacacaatttattattttctgcacttttatttgtgcttaaggaatttctttcaacctaaaattttcatcttttcctctccatttttcaaatccactgaaggtcatcaaaaatattgttttctccttggagtgtttactgaattctccagacaaggcaatttctccttcctttagactggcataataaattccatgtttcacaggaactgttcatagacattgagcagtgactagagttacacttcaattatttccattcaaaccctatcatagaatcataatttagggactctgtgcaggaaccatatcttggtgattattttgtatctgccttacaatacctaacccagagcctaatatatgataagcacttaaaaaataccatgaatgcttcaatataatataattccccaaatagagtgagcctccatattcccaatgagaattttactaattaaatgattttgcccaagaataatatacattcacttatcagtttaatgtttatgaggttatctaataactagttttaattcttagtttattaaattagttacatttacatatttaaaccgcatattttaggctgagctcagtagctcactcatgcaatacttgcacttcaggaagtctagggaggaggatcacttgcatgcacaagttcgagactagcctgggcaacatagtgagacctcatctctacaaaaaataaaattagcaaggtgtggtggtgcgcacctgtagtcccagctctttaggacgatgaggtaggaggatcacttgagcccaggaggtcaaggcttcagtgagctataatcatgccactgcactcagtctgggtgacagagtgagaccctatctcaaaactgcaaaaataaataaatagtatatcttttcaaataacaaaattattaagaaatggcatgttttttcatctcactcttaatacatgatacaacttactcaagctcttacacaaaacccgctcatcaagatctttatcttctctagagctacatttaaagtcctcgtgatcatttcccaggatgcaatctaagcgttttttgaatatgtgattcttatagtctttggaaattttatttcacagacataatcaatttacatatcttctaaatggtctttttttttttcatttgaccttggagcatttactgaattctccagacaaaggcaatttctataggtgtatactcataatatcaacatcatatacatctacttcatttttgaattaattggttttatttcttaaagcagcttttgttttacagaaaaagcgagtaggaagtacaaagttccctataacccctcactccctacagtttcccctattattaatctcttacattagtatgataaatttgttacagttgataaaccaattttatatattattattaactaaggtccttagtttacaggtaggttcactctatatgttgtatattctatggctattttacaggtagattcactctttatgttgtatattctatggctattttacaggtagattcactctttatgttgtatattctatggctattttgttctttaaatagacttttttttttaaagcagttttaggttcatagcaaaattgagcagaaggtacagagatttcccacacactctctgtccccacacatgcataacctccccaattatcaacatcccccaccagagtggtacattcactacaattgatgaacatacacagacacaccattatcacccaaagcccatagtttacatcaggatttactcttggtgttgtgcattctatgagtttttgataaatgaataatggcatgtattcatcacagtatcctacaaaataattttaccatcctaaaacttccctgtgctccacctactcctccatccctttcttccatgaactctagaaaaccaattatctttttagtatctccattgtttggtctttcccagaatgtcatacagttgtaatcatatggtatgcagctttttcagattggcttctttcacttaaaaatatgaaagtaaggttctgtgtcttttcatggctggatagttcatttgttttattgctaaataatatttcattgcaggtaagtgctgcaatttgtttatccattcacccattgaagtgaacactcttgactgtttctaagtcttggcaatcaggaataaagctcctaaagatactcatgtgaaattccttgtatgggcatagtttttcaaagaaatacatttcatattacaatgtaatatatacaattgctagattgtacccacaggaatagttatgaaatctgatttaatgtgtttgcatcttttttacacatttttcctgttgacctcaatatatctttgaattcaacattaattgaggttgtttgtggctatggaatcttcaccttggagtcagaaagtttgtcttattaactgattgtaccatttacaagctatattatctcatgtagaataatctttccatatattagtttatctatatgtaaagtgactatattttagggttgttgagagtattaatggtaaattgtagctatatctattagaaatgatttaaataggccaggtgcagtggttcatgcctgtaatccgagggaggcctccttagagaggctgaggcaggaggatcacgaggtcaagagatagggaccatcctggccaacatggtgaaatcatttctctactaaaactacaaaaattagctgggcgtggtggcatgcacctgtagtcccggctactcaggaagctgaggcaggtgaattgcttgaacccgggaggcagaggttgcagtaagccgtgatcacgccacggcactccagcctggcaacagagcgagactctgtttcaaaaaaaaaaaaaaagatttaaataataacttggaaaatgatgcacatgtaaaaattccaagcatatacttccaaaagagcaagcttggattgtctaactcaaaaaaattgacatgagccacaaaaactcacctcctagggccctaagaaaacatacggtattggatacctaaaaaatccaaacctcaccatgcagagttccacaaaattgacagatgtgcattaatatataattttaaactttgccttagaaatatgcaatgtactaattacaaaatcatacacactcctcaattctcagagtattgtaaaatctttggaaaagtaaaatttactggatttgtttttatatactttattaatatataaattaatttatgtacatatgaattctttcattaattatttcactcatgtactccaaaagaaattataaactaattgcagaggataagacatagctggtgacgtctagagaagcagttctgtgttgcagaatagaaaaaagtttttctctgtagccataatgagctggagaggagctgaatcccaggtcagtgattaactagctatataaatttggcacatgatttaatctttctaatctcaatttccttctgtgtgaagttgagataatatttcttatctttctgggttatttgtcaaatggcaagcaatatttgtaaagttcctgattcataataaaagatcttcaaatagtaactcttgtttggatttccttacctaaatcctttatctgagccctttccagcattctatttttcagcaagatatgtaaatggcttaagaaaattggctcatacattagatatttttaaatcaagttttcctgtgtatcctgtgacttaatcttctagatctatcttatatatcatcattgagaatgaaatatataagaatagattatcaaaactacagaattgtttttatattattgaaatttaaaatatttgggtaattctctatgctagtaaaaaattaataatataaatcttccatcatatcccactgctgcttgagctcttttacaaaaagtttttgaaggagataaggtgatattattaataccaccttgcagaagaaaagaaattgggacccttaacaggtaaaaggatttaatctaagttacataatcagtactggatgtgctgacaagacatctcagcctctggcattcttcacatgttatataaatggcatagtattgggtctctaacttttaaatttaccaatagcataattttgtgtatatatgaagttaaagaatttgttttgaaacaaattactggtgttactgtgattgcagagttgctactttttaatcatatatagctccattacataaccaaatgttcaggaaatatttgtaaaactaaaaaaaaattcttactctgtatattaatagaaatgaatatgagattatatgaatgtgacattaaagattgaaggaatgtcctataagccaaaagctttttgagaaatactcaccatttgcctggaaattgaataatgtcacactaaagacaaagctggattgtgtccccttggcattaactatatggcgttaatggcagatagcatgtgaaaatgtgagcagacagttatcataagggatataaaaatataagaagaagctagatttaaataacatttctcaagaaaaatatagccacgattaaaatatagcttttttatcgtatgatttttaagatttctcaagtttaaagacacagaaatacaatttaaatgatctcagggaaaaaagtaatttattggaaggattctaggtcatgttatggaaaccaaaccagaaaaaagagagggctatatttgtaccccagggacactggatctagtgacaggtagtgaacactagaactcacatgacatcagggacttgggctttcatctctgctgcttcttgaatgctcacattgtttttcccttccttttcaaactttctcaacttagcagtaaagttgactacaagcagttttaaagttgtacacctttcaatttaacctccaaagagaaaacattactaactgctgctatctctggttccaagtccaaaaactgcagagaaggtaatcatttgttcagcttggatcatgtgcccaaaactggacaaacagttgtggccagagaaatacagtcttgttagcaacatggagcattcatagacttatggactgttataactaggagacacattaaacatcacttttctaataattttgttttagatattaatgaactgtgacaacaaatgttcagagacttgaccaagtgacaaaacttgaatttgaataagtatctagtgtttttgtaatgcttaaagttattaaaaggaaaataaaaataaatgaagtaggaagagaaggaaatgaagtagaagaaagaagaaggaggaagagagggagaaggaaaaagaaggaaagaaggaaggaaggttgaaatggagaaagaaagtaaaagggaaagaaaggaagtaaaaaacagaaacaaaaaggggcagctcctactgtaattttattgatggagtgagtgggagaagaggttatattataaagtggctggaaaacaatgccatacttgcccattatagtctatgaaccatgacttacgtagtatatatagcaagtagaataaatcaatgattatatttggcttaaattgtcagattattttactcaatttctctcattttgcaatagatgtgctttcccattttgatttttcactcatcttcccttttatctacagatctgtaggctgtttcttataaaacagattcctgggtgaaaaaatttcttggcatcatcacacaaaaaaataattatttggttctgcctagtttaaaatatcagtgtaaaattaaacacttactacaatgtacctccatttcttaataggcactaagcttcattagaaatgtaaattgagcttttacaagcaatatcttttttttttttttagatggagttctgctcttgctgctcagtcgggagtgcaaaggcacaatcttggctcactgcaacctctgactcctgggtttaagcaattctcctgcctcagcctccagagtagtggggattacaggcacgtgccaccacggttggctaatctttgtatttttagtagagacggggttttaccatgttggtcaggctggtcccaaactcctgaccttaagtgatcatccacctctgcctcccaaagtgctgggattatgggcgtgagccaccgcgcctggcctcactagcaatatctttaatgacgccttggtatactaggtaactacataaattattaaaacacagccataggaaaatgtgtctgtcttcatccagattcatctctaaatgtatgaatgtttgagatagcactattgatgtattgtagtattttctttggggctatctgagtaaagtgaataatttgtttaacaatgttgactatttgcctactaagtgccacgcaggtacttagaagtggaacagaaaataagataattcttagagatctagtccagttgagagaaaaagccttgtaaaaggtcattatagacttctggtaatggcaaactgaatattttgaaccagacttcctgaagagcataacaaagagctaaacaaaatatatgaatcattttccttatgtcatcttataactaataaagtaggaaataattatggcttcaatacctggaagaaaccagaaatctagagagaagagcctgctttttggaatccttctgctctgtaggcattggcagcccagaataggtatccgacagattgggcagtactttgggaagattcctgggtccatggaaaattgccttggaaataaatgtcaccaaatagtgtggctctggtaaatcccttgagaatgggttggaatcagacaagcgtactctaggtctgttacaggtagttagacaggcatgagcatggcaggagagggctgttcacccctacccactagcaatgtcaagtgatggtttgacaattatcacactgcctctctaaaaatgataatttggcagcctgtgccagggcatcagggagagacaacctccttaccatccaaagctattaacattaaagtgttaaaattatgcagcagccaggaagaagcaacttcccaggcatatgcattaagaggcaaaatatcagagtatgaccttctggggcgactccaccggaaaagggaaggaatcctcagatgggcatgtgtaccacttcctaaagacagtgcacgtgctcacttcccaagcgtaaagagggcactgcgcatgagggcagctccccctaagggaagaatcacaaaaaggggcataagatgccagcctacaaagtcctaggatgacagctgaatgcgacacttgttcttcaagtcgcccacttggatctcttccaagtgatctttcctttttttcctgttctaaagcctttttaataaacttccactcctgctctgaaacttcctctttttctgccttatgcccctaaattgaattctttcttctgaggaggtaagaattcaggttgctgcagacccgtacagattcgcagctggtaactcagatatctgccaccagtaacaggtctaagagtgcatcagaagcaaaacagctattaaaagtttgagtcatgtgggcgatctcggctcactgcaagctccgcctcccgggtttgcaccactctcctgcctcagcctcctgagtagcagagactacaggcgtccgccaccacgcctggctaattttttgtactttttttagtagagacagggtttcactgtgttagctaggatggtctcgatctcctgagcttgtgatctgctgcctcagcctcccaaagtgctgggattacaggcatgagccaccatgcccagccaaaagcatcagttcttaaagttgggttaaagcaaaataaatgataaaatatgcaggtaaatttaaatgaataccgactgcaaaaaataataatatattgtctcaggggtcttataatatgtacataattaaaataaattttaaaatgcatatactttgaaggaaaaggtgttctgcagtgcttgcattgtctgggaagagagtatcaattaattctagtacatgtttctcaggaaaaccagtgaactatagtaaaagaggaataaatgctgagttaatttgggggaaaagagaaaagaattttaatatgaaagaaggcaagaaaagagattataaagtataagactacataagacaaatagaaaatgtagagcaagattgtagatttaaagccaaatactaaaaatatttaatgtaaataaagacagttgttatctgcctagacaaaaaacgaaactcgattttacactatttaagagatatatgtaaaaagaaaatacagaaaggttggaaagaaaaaagataagaaagaagatggggaaaaagacgggaaaaaagatgctcctgtagtcccagctacttgggaggttgaggcaggagaatggcgtgaacccgggaggtggagcttgcagtgagcctagattgtgccactgcactccagcctgggcgacagagtgagactccgtctcaaaaaaacagaaaaacaaaacaaacaaacaaacaaacaaaaaaacatataattctgcagaatgcacatcatttttattgtctcaagaagaacttaatagcaattagccaaacactagtcataatgtatattcataaaattcaaaggactgaaatcatacagaatgtttcttgaccacaatttagttgagctagaggtcgatagcaaaaacgagccaaaataagaaaaaataaaattaaaactgaaaaatgctcatgtatatacagaaatcatttccaggtggattgcagatctgaatatgaggttgtaaaccaaaaggtatttgagacaggtctcaatcaatttagaaagtttattttgccaaggttaaggacatggcccctgacagagcctcaggaggtcctgaagacatgtgcccaaggtggtcagggttcaagtgtgcttttatacattttagggagacatgagacatcaattaatatgtgtaacattgccttaggtacagtaaatcaggactacttgaggggggcggaggcaaaagactgtattcttttgagtccttgatcagccttccactgaatacaccaatacacaatttggtctggctcagtgaatctacatttttacataaacaatgcagtggagaaagcaatcagacatgcatttgtctcaggtgagcctcagagggatgactttgagttccgtctgtcctttgtccacaaggaaattccctgtgggggaggtatgtagctttttatctttgtagctaccttatttaggaatacaatggaaggcaggtttgggtgacatagttcccagcttgaattttcccttggcttagtaatttgggggtcctgaggtttatttttttttttttcacaaaagtaaacaatgcatgttttacaaagaaaacataacaaaacatcttattgctcttagagtaggcagtaattttgcttatttaaaaaggtatagcctgggtgcggtagctcacgcctgtaatcccagcactttgggaggcccaggcgggcagatcacgaggtcaggagtttgaggccagcctggccaatgtggtgaaatgccgtctctactacaaatacaaaaaccagccaggcatggtggtgtgcgcctgtagtcccagttactcaggaagctgaggcagaagaatcacttgaacccaggaggcggaggttggagtgagtcgacatcatgccactgcactccagccaagtaagactccgtctcgaaaaaaaaaaaaagtataaatcagagaagaaaaaataataaatcagactattttaaaatgtagaactactgtttatcaaaaatatgccatcaagagagtaaaaatgctgccaataaagtgggaaaatatccaattacttagatcaagagcacgtaagaaatgatgcttaacatccttagtcactgtggaaatgtaaattaaagccactatgccagaatggctaaactgaatactcttcagaaatgagaataaacaatgtacagttacaagtaaaaatatggattaatttcatgaacgtaactgagcaaaagaagttacattaaaaagtatacatattctatgattaaattgcataaagtataaaattaagtgaacctaatctatggttttggaggtcaagatagagattaattctccttcccatagggtgtggcatgttgacaagataaagtattgagccatacacaataaaccatactatttgtttgtttaattttgagatagggtcttgctgtctttcccaggctgcagtgcaatggcataatcatggctcactgcaggaccaacctcctaggctccagtgatcctccacttcagcctcctctctgcaactacaggtatgcaccaccacacctgatgaatttcttgtctttcatagagacaaggtctccctatgttgcccagggtggccttgaactctggggtcaagtgatcctttcaccttagcctctcaaagtgttgggattagtcataagccacagtatttggccttttaaaaatacatacatatatattgaaaatcacttttttttctttccaactttttttaggttcgaggggtacatatacaggtttgttacatgggtaaattgcatgttgcaggggtttcttacacagattatttcatcacccaggtaataaacacagtacctgagaggtggtttttcacacctcactctccttcaaccctccaccctcaagtaggccctagtgtccattatttataaccatgtatactcaatatttagctcccacttataagtgagaacatgtggtgtttggttttcttttcttgcattaactaatttaggataatggcctccaattccacatgtgttgctgcaaaggacatgacttcgttcttttttatgactgcgtaatattccatggtacatgtctaccacatttcctttatccagttcagcactgatgagtgtctaccttgattccacatctttgctattgtgctttaataaacatatgcattaatgtgtctttctggcagaacagttatattcttttttcttttttttttttttttgagacagagtctcgctctgtcgcccatgctggagtgcagtggcatgatcttggctcgctgcaagctccgcctcccaggttcgtgccattctcctgcctcagcctcccgagtagctggaattacaggcgcccgccaccacgcctggctgattttttgtatttttaatagaggcgggtttcaccatgttagccaagatggtctcgatctcctgaccttgtgatccgcccgcctcagcctcccaaagtactgggattacaggtgtgagccactgcacccggccagaacatttgtatcttttagatatatacccagaaatggaattcctgggatgaccgataattccattttaagttctttgagaaatctccaaactgctttcctcaggggctgaactaatttacattcctgctagcagtgtataagcattccattttctccttaatctcatcagcatcaactttttaataagctattctaactggtatgagatagtatctcattgtggttctgatttgcctttctctaatgattagtgatgttgagcattttttcatatgcttgttggctgagtgtatatcttttcttgagaaacgcctattcatatcctttgcccatttttttaatagggttattttggttttgtttgtttgtttaagttccttatagattctggatattagacctctgtcagatgcatagtttgcaaatattttttctttcaatttaggtttctttcaatttactctgtggatagcttcttctgctgtgtataaattctttaattagatcctacttgtccatttttgttttttttttttcaattttggaatctttgtcatgaaatctttgacaggacctatgtccagaatgtttattcctaggtgttattctagggttttatagttaaaagttttacatttaagtctttagccctcaagatgagttacattttacatttttcatttaactcattaagtctttaacccatcctgacttttgtttatagtaaagagaaggggtccagcttcaatcctctgcatatggctagccagttacccagcaccattcattaaatagggagtccatttaccattgcttgtttttgttaactttgtcaaaagttgtttgttgtaggtgtgtgaccttattcctgggttctctatcctgttgcattggtctatgtgtctgtttttatacttgtaccatgctgctttggttactgttgccttgtagtagagtgtgatgcctctggcttagttctttttgcttaggattgttttggctattcagactatattttggttccctataaattttggaatatatttttctaattctgtggaaaatgtttttgatagtttgataggaacagcattgtatctataaattgctttgggcagtatgaccatttgaacaatattgattcttcctacagatgaccatggattatttttccatgtttgcttaatctctgattactttcaatagtgtttcataattcttattgtagagatctttcccttctctggttagctgtcttcctaggtatttttgtatgtgtgtggctattgtggatgggattgtgttttaatttgcctctcagcttggatgttgttggtaaattgtgtttatttcgatcttcagttttctttattactccaacttgtggtctatcaatcttattctttcaaagaacccactttttgtttcgttaatctattgtatttattttaatctcaatttcattcagttcagctcggattttagtatttcttttcttctgctagttttccggttgatttgctgtaagttgggttcagctgagtggctttgtttctggatgatttcacggggggccaggctcagctgagcactcttgagctgcatgctctatccataaggtgtggtgtccaggcccataacttcgttctctgtccccgtgaggttaagcagctgctgtgctggaggtgctagagatgttcccagtccacaagcaccagtactctgataaggggtgctggaaaaagcacttcatcaggatagtggcatcagggtccacacatgcacacacactgacaacagtgtgatggcagtgtgatggagtctgtgtacacatgctcatgctagtgatggtggagtggctgggtctccatgcacataggcaccagcaggggctgggttatggtggtgagttccacatgcatgcatctgtggtactgggtgatatgttttggctgtgtccccacccaaatctcatattgaattataatccccactggttgggggagggacctcatgggaggtgattagatcatgggagtggttcccccatgctgttcttgtgatagtgagtgagttctcatgagatctgatggttttataagaggcttcccccttccctctgcactcattctctcttctgccaccatgtgaagaaagatatgtttgcttcttcttccatcatgattgtaagtttcctgaggcctccccagccattcaaaactgtgagtcaactaaacctcttttctttataatttacccagtctcaggtatgtccttatagtagcgtgagaatgaacgaatagactggggttgtgagaggttcacagagtgcacaccatagcatagtagtaggaagaggccataggcaggtgcttgggggcaaagcagtggtaggaggctgctggcaggtgcatgtcatccgggcctgtctgctaaagctctccgatggttaggtagagtccacaccaagtagctatggtggcagctgctgcaaaatgcctctgttggggatctcaggctgcagtgcaaatgggtgtggccggggaggtgccccagagaaggaccagcaaacaggggtgtgttcagatcagactggccccgtcccatggaccagatagctctgctctgttcaggtctgatagtcaacaaaggccaaagccacctaggggagtgtggtaagccttggaggatgtgcatccctggctatgctctactgtagtcatgctgtgccaacaccccccagttcccagccccaaaggctgacacttctccaagcagctctccatgccagctcggatgtatatggaggtcacggggattcctacggttaatactctagaggtccatggtaagtccatgggccacttctcacctatttaactcactccttccaaggagtcactgggggctgggaacaagtcctggtgcttggcagtctcatgcagggttcccagcttcctcccccttcagcccagtgtctgcatgctccctttttccactcttaatgatttccttctaaagatctccttagagtatactggacttcatgatggtctgttttcaccatgggagatgcttttccttgctgtttctagctagccatcttggctcctctcgcttttttgcatgtgtatttttatgtatatgtcttctacagagaaagcaccaaatttagatgacttcactgataagtcctaccaaatattcaagaaagaaatcctaaactaataaatcctaccaaatattcaagagaactattatataaaacctcctagagaatagaaaaacttagaaatattttcaatttattttataagagcagcataaacataatgctaaaagcaaacaagtatattatgtggaaagaaagtattaataggctgggcatggtggctcacacctgtaatcccagcactttgggaggcaaagggcggggagcacaaggtcaggagatcaagaccatcctggccaacatggtgaaacccagtctctactaaaaaatacagaaaattagctgggcgttgtggctggcgcctgtagtcccagctactcaggaggctgaggcaggagaatggcgtgaacccggtaggcagagcttgcagtgagccgagattgcaccactacactccagcctaggcgacagagcgcaactctgtctcaaaaaaaaaaaaaaaaagaaaaaaagaattagtaataagttaatttcatttatatacagagatgcagctgtcttaaatcattagtgcacaaatccagcaatacataaaaagtacagtattatcacaaccatgcaagatctattccagaagtggaaggttggcttaataatgaaaaatcaattaatgtaatttacttttatattaaagcagaaaaaatcatgtacagaaaaggctattgataataaaaatcaaaagctagtgataaaatgcaataatcatttatggtacagtatttagcaaagtaggaatagatgaaatttttctttttttttttattatactttaagttttagggtacatgcgcacattgtgcaggttagttacatatgtatacatgtgccatgctggtgcaaaaatttttcttatctaatagaaggattttgcaaaaacttgtagcaaatgttattatgaattgttaaaatattatccaatgagattagaaattagaaaaaaagttcctaatattatttccctttcaaattatactgtacattcttgtcaaaacaggaaggcaagaggaaaaaagttataaggttgaaagaaagcaataaaatgctcattagctgcaaaatacatgattatgtatctataatatccaatgaatgtacagatgagttatctggattattaagaagtttagcaaggatgttggtgcaaggtaatacatcaaaactttatgtataaaccagtggtaaacaattgaaagtaaaatttaaaacataatattataatattattgatatatcatatatcaaaaaatagtcctgcaagaatcttaacagaggaaactgtaaatcattattgagaaatcttttatacatgttcatagttaaggaagagttaaataaagagaagagaatatatgttcatgaataggaagactcaatattttaagatgtaaattctcctcaaattgagctatatgttcactggctaaatcccagtcaaaatcccagcaggtatttttagatatcagtaagcagacttttaagttatcctgcttttatttcagaatatggccaagaaaactgagggaaaaattttcacttcacacaactgagccaagttacaggatatttccatgactggatcttccaagttccagaacagaaatattaagctgcaattgtaagatctggttctagatgagtggctattaatgctggttgaagaatctgcaaaactgctacaaagggaagaatgagcccactatgcacattgggatgggaaactattaaaaaaaaaacaaaaaacaaacaacaacaacaacaacaaaaaactcctccaaaattagaaaaccaaaattcccatttccctgaagaaatgtaatgttgatcttttggcaagtgtgtcaagttctgtgttgcaaacaaacaagctccaccttatttttatgaaaaggctacccagttacccactttgtcactactcttagattcaaggttcatgatgtggtttggatttgtgtccctgcccaaatctcatgtttaattataatctcccatgttgaaggaggggcctgctaggagctgattgaaccctggggccgaattttcccccttgctgttcttgtgatagtgcatgagatgggaagacagtatctgagtgtttaaaaatgtatagcaccttcccctttgctctcttcctcctgctcctgtcatgtaagacatgcctgctttcacttcacccctccatcgtgattgtaattttcctgaggcctccccagccacgctccttgtatagcctgcagaactgcaagccaatcaaaccccttttctttataaattacccagtttcaggtagttctttatagcattgtgagaatggactaatacagttcaggatttgcaatttaaggaaacatgcggtgcattctatcatattctctattattagtagatcttttataatacggtacatttcaaatgtgttcctccccaaccacaaagccatttatttatctaaacggccttgccatgtcaaaggcaaggctactgttcagtaaacccctctaaatcagaatgtcattagaagaaatttaaattatatgtaaaggaataaaagctgaaaattgaaggcttttgttttgaaaagttgaacttacaaatttgcaagtgtcattttctgtatttccgaaatactgtaaaatttatttatcataaagtttaatattagaaataaaagcttattactaaaaaaagtaatgttaagaaagacaaataatatagcaaacactcaaaattgtaatttcactcatataaattcattttctacaataatcagaggaaaattaaaattacatgttcaaaatttggaggtgaaagcagggatcaactgtctattaaagttactaaatttgtcataaaaaatttaaagactctggaagatttggtttcatttaatgagttcagggaattaaaaaaacatgtttttctgtatttttttgcaagttcttgtcagaaagcatttggaaaggcaaaaatatatagcagagagatcaaatacggttggagttgagattcagaggcagagataagtgatatggttggagtatatcaatctcccaaggagccacttcccaggttcggaatgtagaaaccaagccagaagtaagagtggcataaaatcatctccctaccacctgcaaactacctctcccatctatctaaacagtggaaatttctggtaatttaacaaaaagtatttatgagttgttaacaaagatatgaaaagctaaaccattgtttcaggtaccatgcaaattgacaatgaagtgttgaaaatgaaacatagggcctcttttctgaatattattatgtattagtccattctcacactgctacaaagatactacctgagacttggtaatttataaacaaaagaggttaaattgacttacagttctgcatggctggagaggcctcaggaaacttacaatcatggcagaaggtgaaggggaagcaggcacctttttcacaaggcagcaggagagacagaaagagcgtgagcggaggggaagtgcccactttcaaaccatcagatctcatgagaactcactcactatcaggagaacagcatgggggaaaatcccctcaataatccaattacctcccaccaggtccctccctcaacatgtggggattacaattcaagataagatttggttggagacacagagccaaatggtatcatatgatctaattgttagacagaatcataaatacacaaagcataggtgaaaagtctcataatagcattaacaccataaaattatgaaagaaggaggagcccattcttcaaggaatgtcaggaacagtttcagaaaagaatctttgagctaggtcttgacagatgacaaatacatagtctcatatggttaactcttgagccttatgaggatgaaaaaccagtatcagaaataaagaccaagttttgatttatcttatgtgccatgttaagtactttaggctgaaggcagtaggaataaatcagctgatttttaaacaggagagagagatacgggcaggttacttatatcggaatcagtgggtgggatagattggataaaaggggcggggaggagaagaaggggcagagaagggaagggagaggagaggataaaccatagttttattatctaacaaaaagcttccagggaatttaggcagacgatagtttttcttaaggctcctttttttcattgactcctttctaattcccccaagtctcaattctgttttctcatttttaatttctatatctcatgtgaacttacatctgcattgatatgattttcattagatattataaagaagaatatttataattaatctaatgttaggaatatttagcatgcaacaagtgaatataggtgcttactaattaatgccttggattacagtgtcctaatgcctggaggtttttggaagtaactctgatctcagtaacacttaccctattgctgtttatctaacaaaacaggcattgcctcagctcacagcatttgtacttgctgttccctttccctgggatgtactttcctcaaacatctacagggcatattcatgtatgatctctgaaatcaccttgcttctgactgcagtatataacatagcaaaggccgctgctcaatttcccaccacctccaattctgtttttccaattctgctccccttttttccacagtatttattgccatctgacattctatggatttgcttgtttgcggccagcctcccccacgagaaaggaagctcctcaagagcaagaattttgttttgttcactgttgtatgtccccggcaccaacaacagtgtctggcacagtgtagatgcctaggtgatatttgttgaatgaattagtaaataatattcctataaaatgtggtgaaaagaattccacatgaggaaattaaagtctagagaaatacaacaacttgctgaatataacttaacattagcaattattatcactgtcattttagtactatttttacaaacctatgctttgacatataaattagctccagtcatcacagcagcgctgtaagatagatgttgcagacagttgtatagattgttcaaggtcagctagctaatggatagaagaataattttctgaccaaatggtgatttgttatatttggatggaatctatgtttcctagcaatttacctgctgggttgcacttcatctgccttatatcccttagctttcttccaccttctgcttacatattgaagaattacaggcttatcattatatatttgcctactgattaaatgtattgtaatcctttatggaattaccataagagatactatggataggctagaacaaactttgaaagagaggtggtgtattcgtttcctagagctgctgtgttagggttcttcagggagatagaactgataggatatatatatatatatatatatatatatatatatatgtatgatatatgtgtatgtgtgtgtgtatgtatatatatatatatatatatatagagagagagagagagagagagagagagagagagacgagatgagatgggaattttttaggggaattagctcccatgacaggctttctgcaacctgaaaacactgaaatgctgatagcatcgcttagtccaactctgaaaacctcagaacaaggtaaacaaatggtgtaactcaatctgaggctaaaggcctgagaactcagggagttgctggtgtaagttctggagtccaaaggccagagagcttagagttctgatgtccaaaggcaggagaagaagggtgtcccagctccagaagagagagagaaagaaggagagcaaatttgcctttcttctcgctttttgttctacctgggtccacagccatttggatgttaaccacacacattgagggcagatctttccccattcagtcaaccaactcacaattcatgaaccaatctcctcagaaacaccctcacagacatacctcatggaaataatgctttatcagttctctaagtactccttaatccagtcaagttgacatctaaaattaaccatcacaattgctgtcacaaaataccacaaaactacagacataaaactcacgtaaaactacagaatttttgtttgtttcacagttctgggggctaaaaaatcaaaggtgccagaatcaaaggcccaaaatcaagatattgggagggccatgctccctgtgaaacctgtaggagaaaatcttccttgtctcttcctagcttctgacggaggtcattgatccttggcattccttgggttacaaatgcatcgctccaatctctgtctctgtcatcacatggcattctccctgtgtgtttttatcttcatgtgttcatcttttatgtacgtgtgtgtgtgtgtctgtgtccaaatttctcttttcttatgaagacaacagtcatactggatttgagcaatccctaactgacctcatcttaactcgattatacctgcaaagacccaacttccaaatgaggtcgcattcatagatgccagggtataggacttcaacatatatttctgcaggacacaatgcaacccatagcagatggagagcatcagcatgatgggattgctaataatgggtttaacgtatcaagctttttctcaattcagagacttctcatgtattgtctcctctgtctgcattacttttctgcccactctttgctcaagttctggtgttgtactggagccatctcacaccagctcctgagggtcaattgttaaattatcagaagccagttgccaaacacagcaattattaaaaattaaatatataaacataattaattacatttaaagcaatggtaatacattctaaaaactcatccatttctagctattttgctacatttgattattatctatctatactctttagattatttgcatctattatatttacatagcagaaatataaaatacttgtattcatatgtctccctaaatacatattcagtgacctcaccttggtagtttgaaattggccacagagtggatatatttataatacagaaatcagctaccagtacaaatcaggtctttttttatccttggaaaagcagctgttaaatatttaccagatatactggttaattctcgtacttcctttaggcctcatcttcatctcctcagaccagctttccatagcatccatttaaaatagactccttcctctcattattctctttctgaattcctttttctattcttcttgaaactcttttttgtaattgtgcagttatacatgcatttattgaatatctgtttttctcactaaattaagtttcttgagagcaggacccatgatttttttatttctgcttatttctagcacagaaatacagcatttagcatatgacaggcacttaataaatatttgttaaatatttatgatgcatttgaggatcaaatggaaaatcaaaattatgagatagtatgttaagtttggtgatcaggcaaagttaaagcatggccaaaaggcactgagtttccagttacctgctaagatgtgtaattaaatttaggtgaaaattgagagtgttaattccttggtatctatttttcctgcctctttgcacttatgatttgtgatggtaaacattaataatcagatgcatgggacaactgaagtaaagagagatgtgtatggcgtatacccagtgagaggttcctagaatgtagtaaatttattctgataaaagaatctgacaattgaagaaaggaatgcaaactggcctatggcatagttaccgacttaccatttgtgccaacgaatccttgggtgacctcactgtaaggagctacatgagataaagatgggctcaatgtagaaatgaaaataataaatgccttcaatgggaggataggtcaacatatttgaagtattctggggtactactaagcctgggaaataatctagggacagaagaggtgggcactagtcttggcttccaggctttaattaaacacctatatatgggcagcatcagctgtagttaggaagcagttcattccatccagagacttggttaccgaaggcccagacttatcaagcatggccaaatggtaagagtaagagtcttgaaagtagacatactgagatattaaaattaactcttagtttattaaatgactttcagtaatgtaattaatctttctgcagttggtttctttatgtcttaaattggggtaacagtacaaacatgttggagaaaggagaccaccactaaagtttaaggaagttttgcatgaattagtaaagggcatcgactctgagctaatgcagtccctctagctaatggcttggcaagaaaatgactcttttgcataagtaaaaagatagtttcttgtttctggtgctcatactcagggtacaagactactggcctccaaatgcaggaagcaagagatctgtacaatcattctgggtcctggggctgaggtaaagattaaacaagatcttatattaaaacactgagctgtatttgaaaacttaaccctgtcacaaatgtcagtttccttcccaaaaatctctcctccttttcttctctttcctgtctccctgacaccactatcaagttggatttccttgcccttggagacaagttagttcaactttaattttctacaagtatctttgtttcagaccctgaatagataacagagagtcatttaccctgttctcattgctctaccccatgtaacccccatcccatgtaattaatcgtaaagtatattttgttttatgaggtatcctgagtaagtgctaatggagactaagtttagggagcatgaaatactgctacctttctccatgtgccaataaacctgctcagtctcagctgtaaaaaaacaaacaagtaaaacctgtttttctcttgttccttaaattatgtcagtacctggcagttgtttatgtttaaaaagtcaacagaaggcagtcaagggaccaggaacatgataagtgtttaaagggtgtgatttactactcagcagtgtgccagtgatgtggcatgaattaaaaacaagaagtcttccaggagaaaagatttctttagagatgtaattaattgacctggcttgggtccctcctttcccggaggaaaaacttctccttttccggagtagttgtcagtgaagtgtttcaaatactgccctggttgtaattattgttcaagttcatgctgcaaaatcatcttcacttaataattctagcattcaccacccaaaaactcataagcaaggcttttgtattgccacacagtttgggattttttttctcagaattaggaagcaaatgtagccagcaattattttagatattgctttcagaaatgaatttttcccatatctgtcagatttggctcagagttctttttcaatttaatcattgttagcagcatgaaaaactgttaagttaaatgttcaggcataagcaagtcattactccatatttgaactctagagagctactggttgtcatggtaatatgactgcacgtgtgaagttagcattggcaacatcacattttcattaaaacatcatgcatatttgcatgaacttctgcccagaccattgttgcaggattggctcctccaccccatctcataatggtgccaagagatttcatatttcagatccaaacttgttagagtttacagcattcattattcatccctcagagatagaagttgacctgtattcaaggcttaacatatatgaatagagagctcactatatatctctatggttaatcctactaattaccgttcccctgaattgaggtaaccctcccatttcttttagtgaatagttttaattactttctttgacttgcctcttcccaaattagggtatgtttcttcaaataactccccatggatttgtagtgttgctattactcctgaagatgtaggtttccccctcccctcccctcccttcccctcccttccccttgatggagtttcaccctttcacccaggctggaatgaagtggtgtgatctcagttcactgcaatctctgcctcccaggttcaagccattctcctgcctaagcctcctgagtagctgagattacaggcacatgccaccatgcccagctaatttttgtatttttagtagagatgaggtttcgccatgttggccaggctggtctcgaactcctgagttcaggtaatccactcgccttgtgctagaattttttttctccttatgccttcttcccagaacctctattatgtttcctttggtttagggctgtgattatacttatttgcccatatgatcatttatttattcaattaataaatatttattatggtttactatgttgtagggtagatgttagatcccaagtaagccagggcaacaattagttgattagagatgtaagctcttgctgtctaccctgttcttggccaaattgtctgtatttcaatgcagcagatatcttcacaaaggtttttttagcacacaaactgtttgttaagtcctataaattagcaaacaatgctagtttactttttgtttccatgtcattgtttaaacattcttttgttgagctaaaggtttgaatgaataaaccaacaatgaggaagtgccagaacagttcctgtatataccctgcatatatttatttgcagattttactagctattaaatatcatataatacatatcggctctctcctttctctgcttacacatacatggttcctgattgatcaataatttaagtgttgcatttggagattactataggagtttcaaatggtgtccatggtacttctgtttgtgcctctgttcatattgctccttacacttagcctgcctttcccgtcccaaattcccactgaagacctggagaaggcctcatctttcaaaattcaattcaagtatcatttcgtttatgaagtgttatataacaataagaggataaattaataacaggataaataaagaataagaaagcacactaaaaactcttttttttttgaaacaaattcttactctgttgtccaggtagagtgtagtggtgcaatcatggttcattgcagcctcaacatcccgggttcaagtgatcttcctgctttggcctgccaataactgagactataggtgttcactaccacacctgtctaatttttgtgtgtgtgtgtggagatgaggtcttgccatgttgcctaggctggtcctcaaattcctaggctcaagcaatcctcctgccttggccttccaaagtgttaggatttacaatccagagtcactgctcccagactaaaagcattttttttttaacaactctggaagtgaattccagcagaaccagcaaaaagaatggaattaattacctctggggaaagtgcctaagggtaaggagaactggggcaggaaactattataagtcttgtaccactattaagcttctaaaatcatgtacatgccattttaatttttaaaaagataaatttttaaaactctatatgcttacattaaaagtatactagttattctgtagtatttctcatcaaattattttaatttggatttttttttcactaaatttaaatggacagcagacccagatgaataataaagcataaagtttgatttcagtaaattgataacttgataactttgatcatttgtgtatttatgccttctaattacagccctctaaaaatacatcagattggtttttaaaaatgtaatctgtaaaagcctttctaccgattgctaactaaatgtcaacatctaccatgtactcttaggaatcattaagaatacaactgagggtcatagatttagaaagatatttaatccaccctaaagatgagataccgaattaggtaatatctagaagtctcttgcatgcctccttccaagatatttataactatacctgaatatctatttagatacagatatctaaaattctggggattgttggatctaggcaagttgcttttaaatgaattatgtgaaaataaaagatctcagaatatctgggaatcttcagtaagagaagaataatgagaaagaatagcattctaaaatattaaagcatattatgcagctgaaatttaaaaaatattattggtttatcaatgaatttgatagagctaggatggaatataaaactcaaaaatacatatgtgaaggtagtttatgataaatgtggaatttcagatcatggtgaaaagaatttttcaatagtggtaggaccacagttttacagccatttagaaaaataaataaaatgcaattttaaaacgctagatccatgttttatgaaaataagagattcccctcccccccttttattttgagcatttactttagaaaacttgtaattatacatacttgatactatttctgaaaaaaaaaatacatccttttgaaacctaggaaagacttttttcagcttaatcatccaggaatatctttctcaaggacctggaagctgtctctttgaaatgtaaacatcaaaggagttagtaccctgcctgccagtttccgtgagcggataggagtctaacttgggtaggcacttccctccaagtggcaaaactacctcttgtcattaaaaaaaaaaaaaaaaagatgtttgtttctcttctaagtaaagccaattccagttagctaaaataaatggtcaccccagttatctggtaaagataaaatggtgctgtcaagccctcttactcgaagactagttattatttatcttgataatatgtgtgtaatgggctgtatctgcttggctatataaaatttctttctgtctttgcaatctctttgtggattgcctgtgatatgctcacattctagattaattcttattcaataatgaatttttttttgtctctctactacttttataggaaagatttctagattgagagattattttatcaccaatattgctaatgcagatttcctctgctgtaaatagcctttgtattagtttgttttcacactgctataaagaatacctgaaactgggtaatttataaagaaaagaggtttaattgactcacagttccacatggctgggaaggcctcaggaaacttacgataatagcagaaggggaagcaagacagcaggagagagagtgaggcaggggaaactgccagaaacttatcaaacaaccagatcctgtgagaaatcactcaccatcatgagaatggcatggggaaactgtccccacgatccaatcacctcccaccaggacaacccctaccctgcccttgacatgtagggattacaatttggattacagctggagatgagatttgggtggggacacagccaaaccatatcagccctgtttttatattggttctcttgtctgtgttggaattctgactaggaccctgtgtggggtaaaacactgtgggatagagatggggcaggttaactagcctggttttctctggggtgagtggcaggaggtatctttcagctgggattaaaaccaagcacattgcttcaagaatttcttactgcttgacttgaatgaaaatgttattactgatgataattttggggcataatctcatgcctaactggtattggaataatagtaagatgtgtaataaacacatgtgagtcttgagaattccgctctgattttgactcacagtaagttacttgataaagtttgtcctacagtctcactacttctcagcaaaattcttactgtgtgatcagatactaaatttctttcagtttattcccagtaaatctgatggaatgtctagattctgcagactttgatccaaagactgaactaaatccaatgaactcaagagaacaacttttaagtagttattaagctgatattctgtgttcagacctgtgcctgggactgaaagaacataaataaatgtaactgaggaagtgttctttctctttgatctagatggtaacttacctaggggacaaatgggagtgggcagatctgaagaaaggaagaatctgttgtaatagtctaaatgtgaggcaatgaattataaggtttccataatagagatgaaaagagacagaaagataaactaccaaaagaattaaaggagcttgataagttcctctgcaaaggctaaattaaaatgagacgtaaatgatcaatgattgacacaagatagtacagcagataaaaatatggatttcggtgtctatgagaactgaattcaagtcccagatctgacattggaattcaacagttacatgattcttctcagtttcagtttccttttgtgtaaaatataacaaacagtacttccttcagaaatgtattataaagttagtgtttttaaaactacaggttatgcctttttcttgagaaattaactttacagtttaatgaggaacagataacattttaataagaaagatctggaaaagaaaagtagaatgcgttactcatggtaaaaataagtatttttgtaacacttttttatagtgattgtatatatgtgtgtgagtgtgtgtgtgtaagagaatcattggattaaaaattaaaataaaaataatagctatttatgacaaatccacagccaatatcatactgaatgggcaaaagctggaagcattccttttgaaaatcatcacaagacaaggatgccctctcttaccacttctattcaacatagtattgaaagttctggccagggcaatcaggcaagagaaaaaaaaatggtattcaaacaggaagagaggaaatcaaattgtctctgtttgcagatgacatgattgtatatttagaaaaccccatcatctcagccccaaaactccttaagctgataagcaacttcagcaaagtctcaggacacaaatcaatgtgcaaaaatcacaagcattcttatacaccaatgatagagagccaaatcatgtgtgaactcccattcacaattgctacaaagagaacaaaatacctaggaatccaacctacaagggatgtgaaggacctcttcaaggagaactacaaaccactgctcaaggaaataagagaggacacaaacaaatggaaaaacatttcatgctcatggataggaagaatcagtactgtgaaaatggccatactgcccaaagtaatttatagattcaatgctatccccatcaagctaccattgactttcttcacagaatgagaaaaaaactactttaaatttcatatggaatcaaaaaagagcccatatagccaagacaatcctaagcaaaaagaatgaagttggaggcatcacgctacctgtcttcaaactatactacaaggctataactaaactatactacaagtcaccaaaacagaatggtatgggtaccaaaacaaatatatagaccaatggaacagaaaggaggcctcagaaataacaccacacatctacaaccatctgatctttgacaaacctgacaccaacaagcaatggggaaaggattccctatttaataaatgactttgggaaaactggctagccatatgcagaaaactgaaactggagcccttctttataccttatacaaaaattaactcaagatggattaaatacataaacataagacctaaaaccataaaacctgtagaagagaacctaggcaataccatgggcatgggcaaagtcttcatgactaaaacaccaaaagcaatggcaacaaaagccaaaactgacaaatgggatctaattaaactaaagagcttctgcacagcaaaagaaactatcatcagagtgaacaggcaacccacagattgggagaaaaattttgcaatctctccatctgacaaagggttaatatacacagtctacaaagaacttaaacaaatttacaagaaaaaaacaaccccatcaaaaagtgagtgaaggatatgaacacacacttctcaaaagaagacatttatgtggccaagaaacatatgaaaaaaagctcatcatcactggtaattagggaagtgcacatcaaaaccacaatgagataggatctcatgccagttagaataggtaccattatggcttacacctgtaatcccagcattatgggaagccagggttggcagatcacctgaggtcaggagttcaagaccaacctggccaacatggtgaaaacccatctctaataaaaatacataaattagctggacgtggtggctggtgcctgtaatcccagctactcgagaggctgaggcaggagaattgcttgaacccaggaggcagaggttgcagtgagccaagatcatgccactgcactacagcctgggcaacagagcaagactctgtctcaaaaaaaaaaaagactagctatcattaaaaaatcaggaaacaaccgatactggcgaggctgtggagaaatagggacacttttacactgttggtgggagtgtaaattagttccagcattgtgaaagatggtgtggcgattcctcaaggatctagaaaaagaaatatcatttgacccagcaatcccattaccgggcatatacccaaaggattataaatcattctactaaaaagacacatacacacatatgtttattgcagcactattcacaacagcaaagacttggaatgaatccaaatgcccatcaatgatagactggataaagaaaatgtggcacatatacaccatggaatactatgcagccgtaaaaaagaatgagttcatgagttcatgtcttttgcaggggcatggatgaagctggaaaccatcagtctctgcaaactaacccaggaacagaaaaccaaacactgcatgttctgactcataagtaggagttgaatagtgagaacacatagacacagggaggggaacatcacacactggggcctgtttggggatgtgggaaaaggggagggatagtattaagagaaatacctactgtagatgacgggttgatgggtgcagcaaaccaccatggcacatgtatacctatgtaacaaacctgcatgccctgcacatgtatcccagaacataaagtataataaaaaaattaaaatgtacttattgttatggattgtctttaaacaagtttgaaaaagcagcactctataatacataaaaagtgttttatgtgatactaacacatttgaaggaaacaagacgtgtcacaaaaatcaagggaggagagcttcaaggatgggctgattaatgctgttaaatatagtagagaacaagggggataaaatctgagaaaaggttggttttaagaataattagcttatagaaaattaaacgtgaatttagtctgcaactattagtaataacacacagtgacattttttataatgctaaatgatagtaaataatctaaaaaatctagtgaaagaaagaaatatgcaagatgatttccacacaagaattacaataaataatgaaaagcagttctgggccttttggtttgctccctggaaggagataaaatagttaattaaagttttattgcttttgaaacattctccaatttaagaaaaggtttgagatttgttatatatggtgcttacatggaacacatgaaacctttatgagacttttttccctgtttgatagggaatgaaactttggttgaatttccagtgggatggggtgagtctggagataagctttatggtttctcctgctggtgtctccagatagcaaacacagcagcggcttccagtctgtggtgcaaagaaagaaatactattctctagtgcagataccatttcacctatctttttataaaataccagattttggtgaaggttcttaagatattcaaataattatctccaagtatctgctgggtggcatggcaggtgaaagcaaggagaattgagacaaatagatagacaggaagtcaaatatctcacttctttttaccccattagaggaaaggcctcactgtctaggcctcattttgagggtcccagtacaccttcctcattctccaagtttctgatcccttctccataccctgcagtctttagatctttttttgctatcaaatgtccacatgtctcagtcagtctagattactacaacaaagtatcattgacttagtgtgttgtaaatgatagaaatttatttctcacagttctggaagtggcagtcccatcaggctgccagcattgctggcttctggtgagggttctcattcagtttgcagatgaccaacttctcatgtatcctcatgtggtcgaagcagagctagttagcattctggtcttttcctataaagacactaattccattaatgagggctcaactcttattacctaattactttccaaagacacctcctcctaaatgccatcgcactgggagtagggcttccacatatgaattttaagaagacacaaacgttcagtccattgcactgtatgttttcattttctctagatcagtcacttttttcctacaaaatttatacatatttagtcttcctccatctcatctagtatctcctaaaattatcaattttaattaaatttccaaggtttttcttttttctttttagttactgttgctctgcagaagagtggccatgtctctttgttcataactcctgtcatgtggggatagaatgtggtgagagggtccataaattattgggtctatgcataaagtgctctagggaaatactggggttctattgctgcatgatatagctatacgttcccagcgctgattctcaaccacagctatactttagaattacctgaaaagctttaaacaatacctatccttaaactcttctcaattaaagtagagcctctgagtttggatcctgaaaatcgtgtgtgttgtgtttatgagctgctcaattgattctactgtgtggccaagtttggcaaccactgtcccagacagtatttcttctcaatctttaatgttgtattaatcacttgaatatcatgttaaaatgcagattaaattcagtagatttagggtgagacatgaaattgtgatttctaataagcctctatgagaagtagatattgtagtttcagggactacactttgaagagcaaggtcctagaatatttaaaattaattatatctcaccagtttattgtcttctgaaatatgctctttcctactcaagcttcaagaaggagaaattattattccatgagtatattctagttttagatgctgacaaagagcatcttgccatgtccgaaaatttactgtacctcattaatctttgcttactgttgtttatcaagtaactgattcaattaactaaattaatggtatcaattgtccccccccatgtgattctatggcaatatatagggcatgagggactctgtatgttaattctacaagtaatttggtatagtcagtagtaggggtcatttggggaaaggatgagaggaaaggctgcagagagaaggacaagttcattaaatgacaataatgttgaacattcattgcacacttactgtttttcagacactttgttatgtgctttatatacattatttaatttaatccccacaccaagtctacaagaagaaaatacttattaaaatgacaaatgagcttagaaactgctatggtttgaacgtttcctccaaagtttgtgtgttggaaacaattcattatgcaactatgttgagaggtgagaccttgaataggtgattagttcatgaggtctctgcccttgtaattgggtgaatgctgttatcatgggagtgggttagttggcacaggagtgggttccttacaaaaaaattacttccgcctctttcctctctcatgtgcatgctttgttgcctttctgccttctgccatgagatgttgcagcaagaagaccctcaccaggtgccagcgtctagacattggattttccagcctccagaactgtgagaaattatttttttctttataaactacccagtgcgtggtattatgttatagcaatgcaaaacagactaagacagaaaccataagaaactgaaaagtttatataaatggattcagatcacatagctaataagtggtaagagccaagcctctatctctctcctgagtcccagctcttatcctgcaacaagcttaaatgggaagtcaaagacagcttttaaacacaaaagaaagatgatccagcagcatgaaggatataggcagggtaagaatggaggcttagatcccacttaggattcctcctctaagaggctgaaatttcataagcttatcaatataatttaagaactggaaacatgtctttttttaattactatcaccaaacacagtgcctggaatatagtagttataaatagttattaagtgaataaatgattgctattataattatgcagaagagtaattttgagagcctgaactaaggcagtgacagtgggaacagtggttgaaatgaaataaagaactagttgaaaagaaattttcagtaggttaataactaatgttacttttaacagccacaatgcttaaaatgcagagaaatttttaaatatttttcaactcaatggactaactctaatatttaccacaggaagaccaaaaatgaagtaataggcgtacaggggctgatgggtgtgccataagtcatacaatgcaggcagactcattttccatatcagacaggtgctgtacagactaaggaatgtggggtcaaactccgaagtcagaggactgtcgtcaagtctctttttcagtagtaggtatatgacattggttaaatctgacactctgctttttcatcatgacaatggaataatgctgcaggaaagagagaaaataatgatggtgagagctttttttttttttttttaagcagtacttctgctatccaaatttgagtatttatccaactattttcagttcaggggctacaatgcctcaaccatatttacatttgaggtatctaaatgtaattctggtgatgtattgtcatctgtaaatttctctattgtgacattattaatacttacattgaaggttattaaaaacttactaaaggtgtatttgtaaaaccactgaaaatttacttatattttttgtgtattgtaagttttttacaatgatcatatattatttttataatctgcagaggttagaaatgttatttcgaaggatttttatttaggagtcatggccgagaaaaaggtttctaaattaaaaaccagaaaagtcatttttactgttttaacaggtagattgtcaagtttagactcataacacagtctttcaaaggtttctactggacagaaacagcctcattttcacaatcgtagtcaaagcagaaaaacatacacagaactaaatgcctagcatctgataagatgaccttttgctgaaaaatcatttggaacagcacttgttctgcagtaactgtcatggtaagtacagacagaaatgggacaaaaaatgaaagctattttggtttccttctattcaacttacagaccacaacagcaagagcacaaattactagctaatctaaatataaaagttcatgagactttgctaaataagtatcctgttactcaaaggagactgagcatctggacttggttatggctgctaccgagttttttgtttgtttgtttgttgtttggtacattcagtaattgggtcgggtcataggatatatattttctttaagggcaaattttagggtgttataaaataatatgagttttaaaagtttaagggcaatgtggctttgaaataaggtacatgtgaattgaaaataagactgtaaattttttttgctgtatgacatacagcaaattactgagccactctcagcccagcatgaccttactacaaaattggaaaagttacacgtaactaaccgtgttgtaaagatgaagaaagactctaagattcatcttttctaaaacttcttaggtattcagtatacattgcttcagtgcaggaatccttaaaagatgtccatctagactatgttattattgtcagtatgttaagatacaatgctgcctataccacttttaaatgcctcttttacttcatgactttcaccttcttttgctaaagcactctgaatctctgagtcactcgccagtgttcagttctgcctttatttgatgctgcacttcagaagatgatttaattctattgtggagcaggataaaactaaataaaagtggtggtacctacctttacagagcttaaagtctaggagggaatgcaggcaataaataaacacgtaaaatgggaacagagattaggaaaatataacctaaactaaaaagctagaaatagcctcttggaggaaaaaaacatttaagcagagatttcaagaagaatggaataggcttagcagagtagaaacttaacaaatattggttgaaatgtattgagataaatcagaccaaatcattgcccatgcctgagcctgaaattttaccaacacagggtttaatattatgagtctacagtattagaaaaatggcttctattacttctattttttcagaataatatatttatatagttacaaaaaagagcacaggattacataaatgaaaaggaacaggttccccttttcttttcttccccacttttactccccagcaatatacttataagcatatctaattttatttctttcagtggtcacctcgactattaataaaatgtgtataattctatttcttgatctatcaaattcagacaatatctatttactttccacaatgatctatcaaattcagacaatatctatttactttccacaatgacaattgaggagttaatgttagttgacttacactatctgtcatcctcatacttttgctggttttgatgattctattagaactatacttcttatataaatttataatatactaaattttttgttgcatcaattttagacagcgtcctcgactccctattatgtaaaatgaagatatttgcatatttatcattctatcacttttcctcctcacaccctcctttaaaattgtcaggaatatatattgcttttttgttttgagggtagagaatacttacatttttctgtagctaaaatccagtcttctctaattcgtagccatgttaaatctgtaaatgaaaaactgataaatataatcaacatgttgtttattgaggaaccaattaatatgtagaacaataggggaaattgtaacatatatgtgattctatatcaccaaatcctttccatttgaacaacaacttctaactgtcaagattgatcacataaaatgtctttcttccatcttgtcaattcttgacaagcagattcactaatttgcttatttattttttctttaaaaatttttttatatagatttaggcagtacaagtgaagttttgttacatgggtatattgtgtagcggtgatgtctaggtttttagtgtagccgtcacccaaataatgtacattgctttcatcctatcacatagctttcctatcttatttatagtgttgaaattatggaatctattttctacatgatggcatttctaaagagctttaattttctacataagggcatttctgtagagctcctacttcagtgaaggtctgctcctccaacagaatttcaatatacttccctaccacaaagttagctgttagcattcttaaatcccctatcttccttgaattatttttcctattttgttggagtgcgtctcttgctatttttctcaggagtatgagagaagaaaaaattttcagtcttaaattgaaaatgcttttattttgcctcaacactttaattagaaacctgagttcctgcccccaggatgcgatgctcattgcatggagcaaggtgatgatgtccttgttccaggcagtgaagaaagggataaaaagggagagaacaaagaacaccactaaaagctgccctatgaaacatggactagttcttattctcatggccacatccagctttagggcatgctggggaacaggatttgtattccggacagaatctgcctggcttaatattttattactttgcaactaagaagaatgcatattggctcacaatcaacaaggtttgccatagccttaattaataaagcctaaaaaaaatcacataacttctaactttaaacagggtaaattctaagtaggttatagtaaattagttgagcagagtgccctgaggtatctgaatgattgaccagttatatagaactgttggctaaaagccagacaaatattagaagacatataatagatataatattttcgttttataattattttgaatcattcttagacaataattaggaagcagaatcaatcttcagttgtgcacaaactcaatgtattacaaaaacattgtgttttcagtaaaaagagaaatatttacccttcttttagtagatgaagagcaaccatgaggtgttaaacagtagtttggcccaagtgtggtggctcatgcctgtaatcccagccctctgggaggctgaggcaggaggattgcatgcatccaggagttagagaccagcctggaaaacatggtgagactctgtatctacaaaaaaaaaactacaaaaattagctgggtatggtggtgtgcacctctactccctgctacttgggaggctgaggtgggaggattgcttgaggctgcagtgagtcttgattgcactactgcattctagcctgggtgacatagtgagaacttatcttaataataaagaaataaatgaatagtataatttgaagactcttgctacagagatttttgtcttttatcaaatgacgtttacttattctttttctggtttagaaacatgcttttattttatagtgaaaacttctcaagaaattttttaaagtgcattttctgtacatttaataaaaatttgatattaaatgttcatttctgaataaagctaatgatgagtatatcacttataactaataaaatatttgtctgcattcagcatcaactatgctgaaaaccagaagatacatatcttctgaaaaaaaaatcagtatatggtttaaaagttatttgttaacttaaaaagaatctaatacctggtagtgtattgctgctataattaaaatctaaaacatatgttggcattgagacctggttgttggaagagactgaaaggactttgaggaagtagttggtaaaacttgaaggaaagtgagaaaaatattattggaggctggggaaaaaaactcttcttagggagtggtggaaatttcgacagcactgttgtctgagataaggtagaaaataggaaatgtacccactaagtcaaggatctagctatagacaattccaggcagaattttaaaagttttaactgcttcttctaactttctataataaaatataatatggagaaatgaactacagaagaataaactattagttttcaaagagaatttaagaggattttgagggcctaaggcagagtttccagtcaacaaaagtttctctaagtaaaacactgcctcggggtaaagatggagtaaacaactataaaacaccttggtaagtcctcagaaaaatgtaaagtactttgttgactcttcaagtaaaaggctgttattagtgtcttaagagtttaccttttggattctgtttgttaaacaatagaactcctcagaaaggacctcaggtagagagggatctatcttagaaagaaacatggtcttggtgggccaagctttcaattttttttttttttttttttttttttttttttttttttttttttttagacggagtcttgctctgtcgcccaggctggagtgcagtgtcgcgatctcggctcactgcaagctgcgcctcccgcgttcacaccattctcctgcctcagcctcccgagtagctgggactacaggtgcccgccaccatgcccggctaatttttttgtatttttagtagagacgggatttcaccgtgttagccaggatggtctggatctcctgacctcgtggtccacccatctcggtctcccaaagtactgggattacaggcgtgagccactgtgcccggccgaagctttcaaaatttttaaagaaattaggatcatggcacaaaaaggggcagcaagagttcaaaatgaaaaaaaaatggcttttgaacacctaatatatgagcaataaacatgctgaaaaactacttagctgtaagtacaggcaatttcttatagaaatggaagaatgactcggaggatgaaagaagtacccagctggcaaagctaagagacatgaagaatcattcccagggaacaaaaccatagcctaataaaagaactgataacatgtactagctaggtttcagaattgttctggactaagtatttctatatggcttctttttctcttttttgaataggagcatttactgtggatttcccatgattgtcttggcattttatgttgcatgtatgaggacacgggtattacgttcctttagttcacaaattttcacagtgagaagaatgacaattgaggtgcctaatctgttcttaggctagatttaaacgatgagatcttgaaactcaagcctgagtctgcttccataattagttgagaatctggggagacttgggagggagagggtatattctgcaggagaagatgtaagtaatttatgaccagagggtagattaaggtgaattaaaatggctgaaaattctttgacgctcttccaatggggagattgggtacatgactgctccccttgtcctgggtgggatctatggctgttttgaccaaaagaatactccagaatactactatgccagttctggtatcaggacttaggagtctatcagcctctatttcctgtctcttaaaagactcttggagccctgagtcaccttgtaaaacatgaaacttaaggcactcattctctaagaaagttagagaaagaaagagaaagagggtgggtgaggaagaagggaaagagagagaggggaaggcaaaaaaggagagagaaagggacacagagccaatgggaaaagagaaatgtctgtcagtcagtttggtctgccataacaaaaatcccataaacttggtggcttaaacaacaacagtttatttatttattatattaattttttttttgagacagagtcttgctctgttgcccaagctggagtgcagtggtgtaatctcagctcactgcaacctcctactcctgggttcaggcgattttcctgcctcagcctcccaagtagctgggactacaggtgcatgccaccacgcctggataattttgtattttttagtagggatgggttttcatcgtgttagccaggatcgtctcgatctcctgacctcatgatctgcccgtcttggcctcccaaagtgctgggattacaggcgtgagccaccgcatcctgcccaaaaatttattattttttttatttgtgactgctgggaagtccaagatcaatgtgtcaggcgctttagtttctggtgagagctctcttcttggcctgcagaaggcagtcttcttgctgtattttcaagtgttggggttgggagttggggaaaagagagagtgcaagctctctggcctcttatagagcacttgtgtcatcaggttgacctcatccccagcatgacatcatctaactctaatttctcccagaggtccaacctcataacaccatcacattgggagttagggtgtcagtatatgaaattgagggggacacaaacattgagtccataacatctggcccccatatatcatggagcagagataagctctccctgctacactttattcttaacttatgatctaggaaattgtgaaataaaaaaaaaaaatagtggggtgttttaagccactaagcactgagttttggagaaatttattacttagtaatacataatgaaaccccaaacagaagatgtagaaaggtcatttccatatcattctgtgaagcatccttttctatttagatcaaataagtgttccaaattcatttaattctatttcaattccaagttttgctgggcatgtatgaaaagtgaaggtctagctgttaacatgttgcctccattatcagaagcagaatttcaaaaacaattttatatcagtgttaccagatgcttcaaataaataattattaaggtaattcaattttaaattttaaagaagattgtcagaaatttgatttttaaaaagtgaaaattaaaaccatattgtggagatttctattcaggacacgaacaatagctcttatcagattaacctgcttatagatgaaagttttaaattctatacaaaatattgaaataaacaactacatgtaggctgtgaagagcaaacaaatgcagccaggttttggaagttgtttggcacatagatgaatggaactgcagttgggtgcatttccccatgttgatggttttcagcatgaagacagattccagtccatgctaagagacatgttaacttgttaaaacaaaacaagacaccagaaaaatagaacaaaatgaaaaacagcagagagccagggactggagaaatagggcaaaaaagcactagttgttccaaccatattctggtttaagattggatgaggaaagtaaaagagaggttatcaaagtaggtggttggtgtaggaaaactcaaaaggaagacggagtagagatttgagttagagctggagatgaaaaacagacatgctacagccatcttttatgtcgtatgtgcttgcttgcctggaattagtgttaaaaatctggacaaagtgtgagtctagcagagaacatcatagtgttgtacaaagtcaactccaggattgagaactggccttcaaatggaagagttaatatgtgatcgattttttttcaattcgatagtacaggtaaacattagataagtgacattactagatctaaaaataagcagtttagcctcgggggggccctgagtgtctatgctttgctttttcttaatacttgcattttgaaatttaactatcttatgataaacttgagcagaacaaatgaaatatgtctgtttttagtacaatttttatataccatatataaaagggtgtttacaagcactgtataataactatatgagagatacttatgtataactatacatattatataatatgtatatataactatacataaaactgtagatatgtataactattgagagagattataaaaagatataaatatgctttttaaattaaaacaccttattatatattttaatgaccaatatgaaaaaatcaaataatatactcagtaggtcataatgtttgcttaacatcattttagaacattataaaaataaagcaattcctagttttgactaaggacgttggctgacattttacttccaacatgttacattctgtctttatatttttaaacaatggcaaaaactcaaaatatgaagagccaagctgctctccttggctctggatatgccttgctttttggatttcagtcaaaaatttcacaccagtgcagcttacttttagattgttactttcagaagtgggcataatcccatttgtgtagttcagatgtacaacctgaagttctccaataactatgtagttgtttttgaaatgaatattcacacaacacacacttctcattggaaatgattctggtatggaagaaagagtggaagttttgaatcagtgtggacttgaattttggcttcatacattgggcaattgacttaacctctccaaatcttattttcttgagtaaaaagtgggaatggtaatgttcaccttacgccagacatagtatctagctgttcataatcataaccataaccatagccataatcataataatgaggaggaggagaaaaaggagtagccacagcaaaagaagaagtagtaataatagtgctactggcaatggaagtagtgttaataatatttacagtaatatttattgagtcactcctgatgaaccagcactatttgaagtataagaacatataaatcaatttaattcttgcagcggctctacaacactttagataactaaagtagaacttggaaaaggaagcagaaggatcatatggaactgcagaggtagaaaaggaccagatcgctgggcaaggtggctcacgcctgtaatcccagcactttgggagactgaggcgggcggatcacgaagtcaggagatcgagaccatcctggctaacatggtgaaaccccatctctgctaaaaatacaagaaattacccgggcatggtggcgggcgcctatagtcccagctactcggaagactgaggcaggagaatggcgtgaacccgggaggcggagcttgcagtgagccgagatcgcgccactgcacaccagcctgagcaacagagcgagactccgtctcaaaaaaaaaaaaaaaaaaaaaaaaaagaaaaggaccagatcaagaaagattgctgagaaccctgagctttactgaataggtgacagggatctaccaaaggtaattaaataaaaaaactaacatgatcagaaagaaaaccccgggagcatattgaaggcagcggttagtaaagttttccgggtaagaaaaagtgcaggactgaactaaagcagagaccgtgggatttcctttttactcagtgcttctatctttggaaatttacctttctccatggctgaaataaatagactgctttattttcaattgctttttaaattaggttttaggagaataattaatctgtaatatattatgacagtgtggctataattaatttttatatttgttatctaatttcaaaaagtttataattattaatttggaatctgtatatatgctacactctttagttaaaagtttgtatacagtcctttttttttaaactctgtatcccagagcacagtgcctatgtctggaagatgagagacacagaggaagacagagaaaaagagtagagaaaggaaaggagagagagacagaagagggaaagcaaaaagcagaaaggaggagaggctgatcaaaataaattacatgatgcagagttttgctacaacatctggcgttctttggattattttttgagggaggtagaaaattcctttagtgtgtaaattaatgctgtttcttggacagttatttggccttggatgccactgaaaaatcagtgagagtcccatagggaacacgtttacgtgtctcttgactgaaacgttagagtgaaagtcagttaaagagcatagtcaaataactaaacaccaaatggggttggatgattagttaaaattatatttaagaagaatattaagtgtaatcacaaatatgtctgtaacacatattcataaaaagtgactggaggacagtagaaaaatgctaacttttttttatcttaggggactgagatttaatggttcttttatattcttcctttttttccttgtaatgtgtttgtattactctgataagaaaaaaatgtaacaagaacaaaaaatttaaaaattctcagattgcggagacagattaacctcttgtaatgaataaagctctattttaagttgcttttcagttttatgaaattaagcttcaaattcaaggctttaaaattgcgggaaaaaagttcaggcttttagagaattcttcctcagaatcgatagttatccactactagacacaagcagtcacaatgtaaacagccctatgtgcaaactattgtggatatgaacagtaaaaccaaaagactgaaatgagaatccagtacgacagccaagcttgccaaagcatcacatcccagtagttcatcaaggtcaggtatggtttcaggcaagactccagggcagtccagtctactgggtaaggacatctgatagaggagaatctggcagaactctgagaccattctaagctgattttctttgctgacagcactctcactcacttagagaagtggactcagtccccgggataaggccctggcaagagctgtacagaagaacctgaaccttgcccagtgggatgtgatatgggacaaaacacgattctgtgggaaattcaactattatgagaatgaatcatgttagttatgatatgtggtgagcaggtaatgtatattgaagaggaggagaggtggagagagaagatgtggagtaaagacaagggtcaagcctatagatcatgccaaccaggtagagagaaaaaatattgtgactcagaaatgtctacaaggatattcagggtttatccttggcatacaacatctggataaatctcttgtttctgacattacctgaggccagctcataaacttcaggtgtgacctgtcaaggccaatctcaaagtatcaggaagcacaaaggcaggaacacaaagtctgtgcttatccgcacaacaaaagccattcttcagaatgtctaggcatcttcctgccttgtctaatcacagaacggtgccactgagagtgagcatgactgatgccccaatggagaataaggagaaggattaaaacagaaatttgagacttggagtaagtgggaaaggaattaaagctatccttttgtaataggaactttgttctatttgacctttcaacatatttatgtattagacaagacagaggcttgagacaagcctgagacaagcttaagacaatgctctacttcaaagcatcatcaccatagtcgtctgtttcaggggaaggatgtgggtagtggtgagcagagacaacctgggatagatgcagaagaaaaaattcaggacaagctgtgtagaatcaacagtctttacagaaaacaataggcagaggtctgtgcaggaaaatgttcctgagtctactgcagatagccgtagcctggggtcttttgttcagagatggggctctagttcttgggatctaagttatttgacataattactttagctgttatctataacaaagaactcacaaatcttaaaggcttaacagaaaagaattttagttctcactcaaaatgcatgtgaagcaaatttagcagccctctagagcagctttttttcaagcagcaacacagggaactatggcacaagtaatttcttctgaacctgcagtccaagttagatgaccttatgtcatgtaaccctaaactgtcctctattattacatctggcttgtgctgttgtattgctgtgagatttctcccactagactgtgaacttctaaaggcagcaactatatctttagtttgtgttagaggtagtcaaaaatgtttgaggcaggaacaaaaatggaaggaagactgatataaaggaagaatatataaaacaccaatttaggaaattcaagtgcatgagcatgtcacttgttaacaataggaaaacaaggccaaaattgtagcaaataaaatatacctcatataagtgcctactatatgtcacacactgtgctagacactttatatagtttgattccaatacatacattcataatttgagacacatagtattatctctgttttttaaaattgtctgtattagttcattttcacattgctatgaagaagtacctgagactcggtaattcataaaggaaagaggtttaattgactcactgatccgcatgtctggggaggcctcaggaaacttgaaatcatggcagaagttgaaggggaagcaagatgcatcttacatgatgacaggagagaggaagagtgagcagggaaatgccacacacttttaaaccatcagatcgcatgagaactcagtatcatgagaacgtcatggaagagaccacttccatgatcctattgtagcccaccaggtccatccgtcaacatgtggggattactattcaagatgagatttgggtagggacacagaacaaaatcatatcattctgcccctggcccctcccaaatctcatgtccttctgaaattttaaaacacaattgtgtcttccctacagtgccctgaagtcttaactcattccagcgttaacccaaaagtccaagtccaaagtctcatctgagacaagggaagtcccttctgcctatgaacctgtaaaatcaaaagcaagttagttacttcctagataaaatggaggtacaggccttgaataagtgctcccattccaaatgggagaattggccaaaacaaagggactacagaaattccaaaacccaacagggcagtcgttaaatcttaaagctccaaaatagtctcctttgactccatgtctcacatccagggcatgctgctgcaaggggtgggctcccaaggccttgggtagctctgcctctgtggctctgtagggtagagcttccatagctactttcacaggctggtgttgagtgcctgcagtttttccaggtgcacagtgtaaactgtcagtaaatctatcattctggtgtatggaggacagtggccctcttttcacagctccactaggcagtgccccagtggggacttttgtgtgggagctcaaaccccacatttccactctgcattgtcctagcagaggttctccatatggcctggacatccaggcatttccatgtatcctctgaaatctaggtggaaactcccgaagcccaactcttttatctttgcacacccacaggccccacaccacacggaagctgccaaggcttggggcttgcactctctgaagcaatggcctgagctgtaccttggccccttttagccatggttggagctggagtgcctgggccacagggcatcctgtccccaggctgcacaaaacagcagggccctgggtctggcccagaaaactgtttttccctcctcggcctctgggcctgtgatgggaggggctgctgtgaatatctctgaaatgctttggagatgtttttgcagaaggtgaagaggaagcaaggcatgtcttgcttgatgacagtagagagagtgagcggggaactgccataaacttttaaaccatcagatctcttgagaactcactcactgtcatgagaacagcatggggaaaactgcccccatgacccagtcactctcaccaggaccctcccttgacatttgggaattacaatttgagatgagatttggctgggtacacaaagccaaaccatatcaatgtcacttagtgaaactaagtgactaccaagttcactcaggcagctagcatttggtattcaaattcaggactgttgacctaaagcttctgtgtgtcttaatgttgactaatttgagctggtaatctaggtgtcttaaaatcactgttgcttagaaagaggttcagtcttcaggttgtgggtgaagttgaatgtgttggtgagagttcaatggcctcagggggcctcatagaaagaaatgcagggttagagacctacccagagctatgttgatctttataagaaaaaacataagcctctggggtcaacttgatctttgagattggagaaattttgtgcatttatcctcttgatgaaaataaatcctggcatatttggtgttagaactcttagattgcaagtaaagaaagccagctggagctaacttaagcaaaacaggacagcaaattataatgtaacaagggagcgtcacagagtccaatgagaagattgcagctgggtcactggaaggattggaattatattctgggaatagaaataatcaataactcaggaggaaatctctcttcaccttcactcttctctgtacctacgtttcttattttctctacggtttagcttcctctgctcccctgtctacagagccacatgtatttcccttacttttatttatttctcattaattttaaataccaagagaaaagactccaattagctcagcttgtatcaggaacctacccctagatcaattaactctggccaggaaggagagaaatggtgtacttcaggtaatgaagtgaatcatatcctaaaaaatagacaactaatccaggtgaggtggctcacacctgtaatctcaacactttgggaggccgaggtgggtggaggtttaggcaggcaacctgaggtcaggagttcaagaccagcctgaccaacatagtgcaaccccatgtctactaaaaatacaaaaaaaaaaaaaaaagtagacagatgtggtggcacatgcctgtaattccagctactcgggaggctgaggcaggagaatcacttgaatccaggaggtggaggttgcagtgagccaagatcatgccattgcactccagcctaggtgatagattgagactccatctcaaaaaaaaaaaaaaaagaatagacatctagaacaagtgaagatcaactaagaatgtggtattatggagagagtgagggaaaggaaattatgggagccctgtgagttagatagatactctgaagacatctagtatgttgacagtacttacagcctacagctggaaagaacatgggatttggagccaagaaaatctggatttggatattgtttaaccttgcacagatcatttaagctcaatttaacataaacgcagatctgttttttatttgtaatattgtagtataatttttacttttaataactactgtgatgtttaacaataaaatatgtaaggtagctaggacacagtgagtgctaaaaactgatatttgccattacagttcttttcttgtgtttttgtttcttctaattgttttatctatgtgtaaagcaataacttcaaaattgagtgaaatgggagccattatcctatgactattacccacataatttcttcattatgtccaatctttgtacattgtgtccagtttgataaacagctctgatttattttcctgtcttgaatatatttaccagtgaaagctttccagtgtgtcactgaagaatgaaagcattaaactgtctggagacagaacttaagaatttgtgtatctcctttggccacagtttatcttgttttaaaagtgattgttggttgatatttcgtcttctgttcttttgctagcttcttcaagaatctttagtttataaacatctcaggatatacctggagtaaaaatcaagtaaactatccaaacatcatatgtatgtctttttaacaagtaaccttggctttagggctgtctaggatctgttcccaggtatttaactacttaaatatcttccagtattattgcttatatggtacagtgaaggtctgtgtaatcaggctacttcactgagtttctcaatgcattcctttctttgcttactccaacatccagtttggttttagttaactagattacgattataaattgaacacatttatatttccttttttcttccttaaagctagtcttattacaaagtcatattaaaaataaacacaaatatacctgcaaaaacccctgaaaaggaatgtaaatgtttactgaggttgtcttgaggacactgagagagggattagatgcaacatcagacacagaattttctatcaatcccagttatctattcattactacccctcaaaagtcaaatttatgacagccacacacatttcttcctcgtctttttttttaattctttctctttctacactttctggggatttgatttcttctgtttgtattcttatcttctacctgttcacaaaacagaagttgtctttattggataccactcttcatagaaaaggagggagaagggacttgtgagaattgttgcttaatattttgtcctatcacataataatagtatccagcataattcaagttatagtgataaagatagatagataaattgattgatttgtcagtcagtcaataggtagatatattggctggcagatagatagattatattagtccaatttcatcctgctataaagaactgctcaagactgagtaatttataaaggaaaaaatttaattgactcacagttcggcatggctggtgaggcctcaggaaatttacaatcatggcagaaggcaaggaggaagcgaggtaccttcttcacaaggcagcaagaagaagtgctgagtaaagaggggaagtgtcccttataaaaccatcagatctcataagaactcacttactattatgagaacagcatgggagaaatcatccccatgattcaattacctccacctagtctctcctttgaaacatggggattgtgagaattacaattcaagatgagatttgggtggggacacaaatctgaaccatattattctgctcctggcccctcctaaatctcatgttcatttcacatttcagaaccaatcatgccttcccagtagtccctcaaagtcttaattcattccagaagtaacctaaaagtccaagtccaaagtcctgcctgagacatggcaagctgctttcacctaggagcctgtaaaataaaaagcaaggtagttacttcctagatacaaggggtgtacaggcattgggtaaatacccccgttccaaatggaagaaattggccaaaacgaagtggctacaggccccatggaagtccgaaatccagtggggcattaaaatcttaaagctctgaaatgatgtcctttgactccatgtctcacatccagttcacactgatgcaagaggtgagttcccatggtcttgggcagcttcatccctgtggctttgcagggtacagcccctctcccagatgctttcacaggctgccattgagtgcctgcagcttttccaggtggacagtgcaagctgttggtggatctaccattctgggttatggaggatgatggtcctcttctcagagctccactaggcagtgtcccagtgtggactctgtgtgggtgctcttaccctccctttcccttccacactgccctagcagaggttcttcatgagggctccatccctgcagcaaatttctgcctagacatctaggcacttccatacatcctctgaaatctaggcacaggttcccaaacatcaattcttgacttctgtgcaccctcaggcccaaaaccaaatgtaagctgccaaggcttggggctttcagtctctgaagcaacagcctgagctatatgttggccccttttagccatatctgggacacagggcatcaattcccaagactgaacaaagaagcaaggccctgtgcccagcccacaaaaccagttttccctcctaggcctctgggtctgtgatgtgggggctgctataaagacccttgacatgccctggagacattatttctgttgtcttgctgattagcatttgactcttcattacttatgcacatttctgcagcaggcttgaatttctcctcagaaaatgggattttcttttctattgcattgctaggtggcaaattttctgaacttttatgctctgcctcccttttaaaaataagtttcagttccaaactatctttatgtgaatgcataaaactgaatgcttgtaagagcacccaaatcatctcttgaatgttttgctgcttagaagtttcttccaccagataccctaaatcatctctctcaagttctaagttccacatatttctagcgtaggggcaaaatttcaccagtctctttgttaaagcatagtaagagtcacctttattccaattcccaaaaagttcctcatctccatctgagatcacctcagtctggacatcattgtcatattactatcagcattttggtcaaagccattcaacaagtctctaggaagttgcaaactttcccacatctttctgtcttctgttccaacctctgcctgttacacacttccaaagtcacttccacatttttgggcatctttatagcaacaccccactctctccagtcccaatttacttctataaagaactgcctgggactgggtaatttatagaggaaaaaggtttaattgactcacagttcagcatggctcgggaggcctcaggaaacttacaatcatggtggaaggcaaatgggaagcaaggcacttctttacaaggcagcaggaaagagaagtgccagggaagagccccttaaaaaaccgtcagctctcatgagaactcacccactatcatgagaacagcataagggacactgattctatgattcaattacctccagctgctctctccctcaacacgtggggattatgaggattatgatgattacaattcaagatgatatttgggtgggaacagaaagcctaaccatatcgtagatattccttatataagacttgaaaattgatattttcatctctgttttataaagaaggagatcaaagttcagggaaacatgttcagtattaggaagtagcaatgcttgtggtgatgtttatcccagttatccaggtttgatcattactcattaaatgcttgcatcaaaatatatcagatgtaccccataaatgtgtacaactattatgtacatataaaattttaaaagtttaaatgcagtatgtttttaattaattgacagattctaaaatgtatatgaatgttcaaatgacccacattagtcaaaaaaattttaaaaagaaaagcaaagctgcagaacttatacaagctgctttcaagacctactataaggctgtattagttatgacaatgtgttattgacataaagattcatgggaagaataggtggcatctgaaatagactcacgtatatatggttaattttggaaaaaggtataaatgtaactgaatggagaaagagaatcttttcaacaaatatttatataaaactgaatattgatatgggaaaaagatgaacatcaatcttgacctcatacaatacagaaaatattaaattggaatagattatagacatgaatataaaatctaaacatagaatttatagaagaaaatgtaagacaaattcttgaaaccttcaggtggtaaatattgctcatctagcacacaaagattataatcctccataacggataaatttaacttttaaaacaattaaaactttggctctacaatggacatcattaagaaaataaaaagacaagttacaaaatgggagaaaagatttataaaacatatatatctgtcaaataacctttatccacaatacataaagaacagttataacacaataagaagagaaacaacccaaaacaaaaatgagcaaaacattttaagaaacattataaaagaaaataaaccaatggccaatgagcacagaaaaagtgctcaacttcagtgaaatgcaaatgagatacattgcattacacattacaaatgaggtacattacatatccattagaatggccaaattaaaaaaataataataccaaatattgactagaagatagaacaactggaactcttattcactactcctgaaatttaaaatggtacaaccactttagaaaactctttggcagtttcttataacgttaaacatacatctacaatatgatcaagctattccacatctaggcagctattccacacctaggaatttaaagaaaagaataaaaagagatgttcacttagagatttgtatacaaatgttcataacagctttatttgtaataattccaaactggaaagtgggatgaatctaaatatcactccctaggtgattgaaattttaatcatgcattatattcatataatggataactactcaacaattaaaaagcagaaattttaatctgcataacagtttgtattaatcttgaaatcattaagctgaatgaaagaagctatacacataaaatatgattctactcataaaaatgcagaaaatggaaactattttataatcaaagaaaacaaactagttactgactaggaccagggtgggaacaattaattggaaatagcacagggaaatgttgtgtggtgttctcaccacaaaaatgttaatgtgaggtaatgcatttggtaattagtcagattaaaccatttcacgatgtatttatatatcaaaacatgtacatgcaatgaatacacataattatatctgtcaattaaaaaataatactttttttttaaaaaagaaaatgttctgtatcttccttgtaatggtggttgcattagtgaataaatttattaactcttcttggaatgtgcccttaaagtgggtgaattttactttatgtgaacctcaatatgataattcaaatcttacataggagtatgaatcaatggtctgatatggtttgaaagccagagaaaattaggtaaactttctgagccttgatgtttctcacttacaatgtggattaatttacaactgtcatattgaaattaatgatataaccaaagtattatacctagaaggtactcagtacttgttagttcctttttccttacattattttaactaattacatagttttcctttgataggccttaaattaaaagaatcatttccaaaactattccagaaaggatgctaacttaaacctacttgacatttgtagtaagcaggcattaaacagtgctctatattgtatttaaggttaatacattttcagaaacaacttgttttataatggactttcttgagggtagaacttatggagaataaacagcatctacttaaagtgtgcattagaaagattttgacagatttgtatatccataaaccaccacagctaacaaatacagaacatttgcatcccaccatctttcccatttccaaaagtttccatgacctcagtgcagttcattctcctctggccccagggagctgctgatctgttttgttttgttttatttttaaatcgctatggattagcttgtatttttaaatttttatgtaaataaaatcatgctatacatatgtttgtgtgtctactttcttttatccatataatgattttgagattattcatccatgctgctgaatgtactagtagttagttccttttaaatgatgaataggtttccttgcatgagtatagcatgttttgtttatctcttcactcattgatggagtattgaattgcttctaatttgaggctactgagaagaaagccaccatgaacagtcatgtgtaattttttagtgtggacatgttttcattttctctccattaaatacctaggattggaatgtgtgataagaatctcttttaattcaatttctacagagaagaaaaacagagtaggtccaaataatgaacagttaaataacaaagcctggttatgtatcttctacacagtaaaatatggtcatttagatggcagcttttaatccatctgtttctgtaccagcctttcaccctcagactactttacgtttatatattctcatttatttttattctctcattgctgagcttacttttgcccttccttgaagttatcagtatacctgctattaagagttctgtgctttccagccaggcaccatagctcacgcctgtaatcccagcattttgggaggctgaggcgggaggattacgaggtcaagagatcaagatcatcctggccaacatggtgaaatcctgtgtctactaaaaatacaaaaattagccaggtttggtgacacgtgcctgtagtcccagctaatcgggaggctgaggcaggagaatcacttgaacccggaggtgggggttacagtgatccaaaatcgcgccactgcatttcagcctggcgacagagcaagactgtctcaaaaaagaaaaaaaagaaaagaaaaaaaaagcgttctgtactttcccacttattgggtctaatcagttatcctgggagtttgtatagctaagtgagttaagtttgttgtaagtgatggtgaaacaccgaatgagacctctctaccgtgagtcctaggaatacttagtttgatttattaaagggctttgtttcccttttgccttctgaataactgtggttgcctgggaagtactctgcaataaaatgtagataaactcctaaggactaattctactttccttggtagatacaatttttatattgaaaacaattaagtttacttttattttatgaataaccttataaaatcatctgaatcaacctcaaatatttctcaaattattttattttattttaaacttttattttggattcaggggatatatgtgcaggtatgttatcagggtgtattgtatgatgttgagttttggggtacaaatgatcccataaacccagttactatgtgtagtattcaatagttggtttttcaaaccttggcactcccagtaaaccccagtttctactgctaccatttatgttcatgagtacctaatgtttagctcccatctataagtaagaacatgtggtatttggttttctgttcctgttaatttgcttaagataatggcctccagctgcattcttgttgctacaagggacataatttctttttatggctgcatagtatttgatggtgtatctgtgtcacattttctctaccaaatctacctacattgattccatgtctttgctattataaacagtgctgcagtgaacctgcaagtgcatgtttctttttggtagaacaatttgttttcttttggatatatacctagcaaagagattgctgggtcaaatggtagttctgtcctaagttctttgtgaaatctccaaactgctttccagagtggctgaacaaattgacattccctccagcagtgtataagctttcccttttcttgacagccttgccagcatctgctgttttttctttctaacagtaaccattttgactggtgtgaggtggtatctcattgtggttttgatttgcatttctccaatgatcagtgatgttgagcatttttcgtttgttggctacttatatgtcttcttttgagaagtgcctgttcatattttttgcctgttttttaatggggttatttgttttttgcttgttcagttgtttaagtaccttatagatcctggatattagacttttgttggatgcatagtttgtgattatcttctcccattctgtaggttgtctgtttactctatcagttgtttctttcgctttgcagaaactcttttgtttaattaggtggcactggacaatttttgtttttgtagcaattgcttttgaggacttaatcatattttttttttccaaggctgatgtcctgaatggtgtttcctaggttttcttctaggattcttatagtttgaagtcattatttaaatctttagtccatcttgaattaattttgtatgtggtaaaatgtggggacccggtttcattcttctgcatatgactaaccagttattccagcaccatttattgaatatggagccctttccctgttgcttatttttgttgactttgtctaagatcaaatggctataggtgggtggctttattttagtgttctctattccggtccagtggtttatgtgtctgtttttctactggtactatgccattttggttattgcagccttacaccgtagtttgaagttggatattgtgatgcctttggctttgttctttttgcttagtattgctttggctattcagggtcattttttgtttcatatgaatttaagagtagatttttctaattctgtgaaaaacaatattaagagtttgatgtgaatagcattgaaactgttggacaatatggccattctaacaatactgatttttgcaatctatgggcatgaaatgtttttccatttgtttgtgtcatctattatttcttttagtaatgtttcatagttctttttgtagtgatctttcacttccttacttagacgtattcctaggtattttatgtgtgtggctattgcaaatggaattgtgttcttgatttggctgtcagcttgaatgttattggtgaatagaaatgccactgatttttgtacattgattttgtatcctgaaactttactaaagccatttatcagttccaggagccttttggcatagcctttagagttttctagggatagaatcatatcatcagtgaagagagatagtttgttccttttcctatttggatgattttatttcgttctcttgcctgattgctctagctagcacttccgtcctatgttgaacagcagtagtaagagtgggaatccttgtattgtttcagttctccaggggaatgcttccagtttttgcccattcagtgtggggtgttggttgttggtttgtcataaatggctcttattattttgaatttcaagcatttttaaagatccacattcaaaagttctaataactttttatttcttagcttttttaaacatcttcatactacattttatttagagaattcaaactattcttttgctccttgaatgtgtgtttgtgtttgctgatagagtgagggatatatgctttgaagtataattcctaatattttgttttggcaaggttgtgcaaagaaacattatggaatctggaaattagtgggaatcattagtatatttcttataaattccgtaaaaatgacatgacattatacatctttacatatagcagaggaggaaataagacattttaccttttttttagcctcttcagggcaataactgtagcgcatgtctcattgtgtacccaatatccctcttccatattggggagctacgccttccccaacccttttcagttctaatgggactatcaagcactgtttgctccctgatcataatggtacaaactcattcctagtcaagcagcctacctcattttacacttcatagtaattggtccaagtaatgaacatagaaatggtagggtactttattatatccaatatataaatattatgagagaaagagagagagagaatgatgctttcttatctgtgttgttaaggtttaaagatgttgccttggttctgcctgtagcagaaaagagttaggtcaacattcacagagggcagagataatgaaagtcaagaaatgtaaagagaatcagacagacctgatattggtgagactctgaatataaatgttatatatttgaaatacacactcttgtactgcttatatatgttagctaagatagttccgttcttcactgcaggattttaacgactttattggctgctccctagctcttgaaactttggcttcattgatctcttctttctgaactgcttcttcttacccgatgaataccaacttatatactgatagtctccttacagatacccttaatttattttgttggaaaaaatgttcacctcttttaagatgataaaaattctcatagatcttacaaaataattttagatacatcaatacattacttcttatatgtttttaaactttttattcagtacctcatttacctgcattttatcttctgttcaaaactataatcaccttaaaacctagggttgtttggttacatctgaaaatttctctacagtatacagcacaatttcatattcataggaagcactcagtaaatggagtcaaaaataaataaattaaaatttaaaaatacaagatattttctacatgaacaactttccctaactccctgaaaaccatgtgaagtgactttcttttatgctctcagattacttttcatttgcttcaaacatagcacttctcacatggtttagaatttttctgttgactcatcttccttatttctttataatgtaattgaagactttacaggtggtgtttattatttgataccaacaacctaacacagtatctaagaacataatgaacactgagtaagtactttttgacttatgaataaatgcaatgtaatgcagtcctatgtaaggactacaaaatattctttaccatctaattttttacattaactctattgctcatcttttcagtgatttttttatcataatcacagatagatctttaaatggaaaattattaaattagaaattaagaaatttttaaaaatagagtatattttaggtgtcgtccttagagcactgtggatcagaggtctggtgaattactccacgtcacatggttcattaaggaccaaccttatttcctttccattattcttttattataccatacaacttttctatcagtattggattatccaatttggcaaaagtgtagagcagtgatttttcacatatttttccttaagggaggaggacgtgctgtggattcaggttttagttaccagaatgtcaaaggaatagagttcacccagaccaaatgctcctgacatgctcttgcaaagaacatgcagatgactattgcagatcatttttaaaaataggaattactacgatagaatccctaaataatcatattattttagtctgaatagatactaattctgatcatgtttttcttgattttattgtttttttttataagcaagtagcatctttgtcccccccccaagactttctgcagtcattgtaagaactttgataattgaattcctgtggtcattttttatagctgtccataaaccttttccaaattttggttggtatgaattaaggtctgttcctgttaaagtacaagcagtttgtttggattgaatgcttgtctcttccaaaaataggtttaatttttctttttatttctattctttacttgttactaactacaaattcttaagtgtgtttcaacttttatgtcaatgtttttcaaagttgaaaaaccctagctctgtttagccaatttatttaatcttcattattttgggatttagtttgtgtgtttgttttccgaagagatttaatgtaaaagtgtctatactaacaatgcttttttgaaattgctttattaaggctagatatagagtttttaagttaattaagtctagttaatatagaattttacaaatattcctccatagatttcactttatttattcagtaaacatttattaagtacttgttgttttccaggctacacactgggtgctggccttacagtggtacacaagatcaacataatccttatttaatggtgtttatttcctcatgagaaaagtatatattaaagaaatcacccagcattttggcaggctgaggtgggaggattgcttgaggccatgagtttgagaccagcatgggtaacatagtgaaactttgtttctacaaaaatgtttttaaaattgaaaaaaaaaaaattagccagttgtggtgtcatatacctagctactcagaaaacagatgggagaatcacttgagcccaataattcaagactgaagtgagctatgatcatgcctctgtgcctctgtactccagcctggatgacacagcaagaccctgtctctaaaaatgaataaataaataaataataaaggaaataagcattaacaaagggtacagggtgcttttgaagcacatagaaaaagtaaaggaaggattgcttggtcaagtaatgtttaaccagatatcaatatattgatgagcggtcaaccaaataacttaaaaacttgatgaacttaaaaactcgataatccagaccttaagaaatatagcaggacattttacattacttttaataatcctggccaatgaaataaaaagtttttagaaaaaggtccttgttagaaacacatttttaaatatgtctgacatatactcttagatataatacagttatgacttgaataacatcaaagtgacataagtgagagtatttctggtaatggtggagagtggtcatttaagccctttgcatatttcaattacgcattgaaccgaatattaaaaataattattcaacatcttagaaaacaagaagaatgaggagaagagcaggaggaggaggaggaggaggaagagaggaggaaactgcagccatcactgccattgagtttgttttcgaaaaactgtagctgaaagggcaagcattgcatgtttaaggctttctggcagaaagaactccccaaatacccacgatgctatcaggcaagaacagcagacacccctagacttactggctcaaagtaccaaagaattgtgtttatgactgaaataacagctggaagttcaaaggggaaaaatccggcattgaaagaatttcaggagtaagacccaaaatatgactataaaccctgcacaaataccactttgacagccagactttacatgcagataagaccctcaaggatcctagtaagaaatgcagtcagagatcagataggagcctacacttgaaaaatagtgctgaaccaggtaagatatgagtttgctactttttaactgagtgaattcctcagcagtatggagttcagaaagctgaaggcatcttatcttgagatttaaaaaaaagcctgagattgtcagagcagctgaaatttagagaggaatctagaatcaggaaaccatagttagtctgatgatagtataccttgacagtgtttttctttgtgttcatttgattagggcttgtgaagcatatcgagtctctaatttctattgatctatattcaattttactaaatttcttacctctttgaatttctcttaaaagatataggactgtttaaaaccaaaactgtaacattgtattttgaggtttataatgtatgtagatgcaatacatgtgatagcacagtactaacagggaagtgagtggaaatgtattgctgaaagattctgatttttttttaaggatgaagagaaatgacatcatatggcaactcagatctaaagaaattaataaagaacattagagatgccaaataaaaagtgaatatataatacataagaaatatcactgtagaaattaaaggagaacaaacaaaaagccaatgcaaattgttaggtgtaacaacaaatttattggatgaacttaacagtggaatggaggtggaagaagatgtagttaatgcaataaatgtttttcaagaaatttgggacattttcaggtaatttttttgcaacagaataaaaagcctaggaatagccgcacatgtatatggtcaactgattttcaacaaattacttttaagcaaatattgctagaacaacaggattctatctggaagaaaatgaatatctattaatcgtcccatgccatacataaaaatagatttgacatgaatcatagacctaagtatatatgctaaaattatagaatttctagaataaaaaagatttttacaatcctggtataggcaaatatttcttaaatagaacagagaaacataactattaaatatattaattaattgggatttacaaacattacactcttttaaaaagacatcattaggaaaatgaaaaaacaagacacagaatgtgaaaaaaatttgttatgcatgtatttgaaaaaaaaaacttgaatccaaaatatataaatgtaaaacagacacactgcaataagaagattttttaaccaaagcaataaagaggagaaaaatttgaacagatattttacaaaagaagctatataagtgacatagccataaacatatgaaaaagatgttcagcattataaatacttattagaactgctaaaaaaaactcacgctaaaaaaattggcaaggttgtagagcaaatggaactctcatacacttctggtgaagattttaaagggtacaactactttgaaatagaatttatcagtgtcttattgaagtaaatttttatgaaccaaatggcttagcaattgcactcctggatatttacccaagataaatgaagataactgttcacacaaaggcttgcacatgcatattcataaaaattgtatttattctagccaaaacttagaagcaaattaaatgtctattaacaagtgaatggatgaacagatgtcatgtcattttcattccatggaataatactcagcaataaaaacaaatgagctattgatatatgcaggagcatgcatgagtttgaaaaatattatgctgacctaaagaacagaaacaaaagagaacatataaaatgattaaatgtatacaacactcaagaataggcaaaattaacatatacatttcatccaaggaatgcaaggttagtttaacacacaaaaatcaatgtaatgcatcatcataatagaacaaaaaacatgatcatcataggagacacagaaaaagcattttataaaattcaataccccttcatgataaaacaaacaaacaaacaaacaaaccctcaacttaagggcacctatgaaaaacccagagctaacatcataagaagtactcaatgctcttcccctatgatcaggacaaggttatctgttcttgctaattttaataaacattttactagagtttgtagtcagaaaaactagttatgaagataaaataaaaattataaagaaatacaaattataaagatagaagaaaactatcttttttgtatattagttgattacatatattgaaaatcctaaggcatctgtgaaaaactgttagagttaaataaattcagaatttttagaataaaatatcactttacaaaaattaactgtaattctatacactagtaatgtcaatatgaaaatgaaattaagaacacaattccatttacaacagcattcaaaagaaaaaactactttagaaataaattttatttaaaaagtgtgatattcatgagctaaaactacataagaatcttgaaaagttaaataaaatttaaataattgaaaacccaccccatgatcatgaagcaaaagaattaatattgttaaaatgacaatattctctgtcttatttcgttctgtgctgctttaatagaatatcatatactgggtaatttataatgaatagaaatttatttaccttgtggttctagaggctgggaagttcaacatcaagtggccgcatctggtgaaggctttcttgttgggtcataacgtggtaaaatgggtaaagcttattaaacataaattgtaaccccataaatattatttttaaaaatgatattagtaacaggaaaaaattgagtagtagaaagagacatggatttatgttatggtttccttgcacattcattcagtgatcttcagcagattactcatccatctcaaacttgtattctcctctataaaaataaagataaaaatatatacatcacaggtttgttctgaggattaaataaaatataattttttcaaatgccatatttatgtcaaataggagtgtattagtcagggttctctagaggcacagaactaatacgatggattaaaaacaggagtttttaatctgcatttcttctggaggctatttttttgtttgactcaattgtattgcaaagattattttgcttatgtttgaaaaattatattataaataaataccttaatttctattgcatatcattgcacattctctatagctagagattttttcattgctttggatttttgttatttggttttcagtgagatttaaagtcaagtattccataggatctagtgagttaagacaaagctctgttggaattccttctatgaatgtgatttttttttttttagacggagtttcattcttgttgcccaggctggagtacaatggcaggatcttggctcactgcaacctccacctcccaggttcaagcagttctcctgcctcagcttcctgagtagctgggattacaggcatgcaccaccacacacagctaattttgtatttttagtagggatgaggtttcaccatgttggtcaggttggtctggaactcctgacttctggtcatctgcccgcctcagcctcccaaattgctgggattacaggagtgagccactgcacccagccgaatgtgaaaatattatagtttcagagagtttcacaaatattcctccaaagatttcagttaaatagcttacttcctcaacatattttcagaactgagtatgttctcagaactctgctagatgctactcatacagtggtgcacaagtcaagatagaatcctactctgaagttctttccctatctgtgttgctacatacagaccagtaactgcaagtataatcagtgggcaagaaccacaggatgttttagaagtgtatggcaaaggtgggggaagaatttaatggtcaagtgatgtttaacctaagattaagattaatcgcagcattatttacaacagccaagatatggaaacaacctaaatgaccatagacagaagaatggagttaaaatatggtaaatacatacaatgtaatattactcagcctaaaagaaggaaattctgccatttgtgacaacctggataagcctagagtatgttatgcttagtgaaataaatcagtcacagaaggatgaatacagcatgattctacttacatgagttacctaagaaggtgaaactcatagaatcagagaatagaatggtaattatcagggtctagagtgagggaggggaaatggggagttggttaaatggtataaagtttcagttgtgcaatataagcatattccagagatctgctgtaaaacatagcacttacagttaataatattgtattgtacacttgacaattattaagagagtagacctatatcaagtgttttattataaaaaaggaaaaggaaaaggacacagcaaattttggcaatgatggatatgtctattaccttgattgtggttcgtagttccatgggcgtttgcatatgtccaaactctttaaaatgtacacattaaatatcagtaacactttaataaatgtgttaaaaaagattaatgtattggcttcattaagaggaaacgatgcaatatataaggcaagctgataacatatcaggtaaaaaattcaaataaaaattttctattgagctcagagccaaattcagcaatataaacacctactaattacatctgtaatctgcaaacagagaagattgatggtcaaagtgagaagtgtgtttcttcaatatgtttattatttcagtaaattgtcctcgtcttaaaagacgtaggcctttttgtaaacaagtattgtgtgaggtatgtgtggactccaagagaaatctggagagtggctcttctctttggaaaactttactttgttcaggtaaaggaaagctcctgaaaacaagaaacctgaaaaataatttaagtgattctaaacccttaaatacactccaaagaagcaattttaggaagcttccactttggcttcaagagttggccaaatctgatattatttaaaagaggaaatagactatttctgacgcacagatatttgtaatcaggattctatttttgtcatcggaatttctgttagcaattagacggtccattgccttcaacaataacccctagttatgtaataccccaccagtaaaaccatccccagtactatgcattaatatgtggaatctaaagatgttaatctcatagaaacagggagtggaaaggtggttaccagaggatagggggaagagtaagggatgaaaaaaagagaaacgttgacaaaagggtataaaattttaattagactggaataatcagttttagtcatctattgctgtaatgcccacagttaataataatgtattgtatgtcccaaaattgcgaaaagaatagatttttaatgttctcaccaaaaaaaatgatgagttcatgaggtgatgaaaatgtgaattagttgattgaatcttttaatgatgtatgcatagatcaaaacatcacattgtactccataaatgtaatattaataatgattatttgtcaattaaataaatttttaaaattcgtaagaactccaaagaaacaatggtagcatacctacatatagcacgacacaaagaattatgtttagaaaaaataatgcaattacaaatatttcagaaaatgtttatctgggacttttgaagcaggaggaaaagagattgtgttaaaattaggagaaaatacattatctgtccttagatactgaggaggatgtactacaagaccagaggtaggcagtcttatgtagatttgttttaggaatggacacagctgaaatgctagaatgtaattttataaattaagcaattcctggatccaaaccgatatttctcaagtaatatgcataggtaccatgtaagccagaagcatgttgctgctaaaatggaaacataatcctatttcaaaaaaatttatcaaacattttaagtttataaaaagttcttgcttttttgttttctctgaatttttcttaaactatgggtgtctgctattatttatctattctacactcaagtatagagtgtcttctgattctgtaaaaattacataatttgttagtaattaaaaatacagtattccacattcttttgcaagagtttctgtgactttatgttactgtcccatctgagcaatattgagaaccattgatttggaactgtagtaatctcactctatcatattcgtagttaagccagagaagatctcagaaatatggaagagtattttgtaagtttcatatttttgcctagggtgtgttcacctatctcagctaaggcaaatagaagctatgtcttggggcatcttttaatctctaaatagaaaatataagcttctttgctctgcatgatttatgaggaattttcttcatcttcttaataagtaactcaggctgtcactctgtaagatctgaatgagcagggtaccttctaggttacgcttgaaagtgctatcactttggaaagcctgaccatctccttcctgcctagatgtctaacaggtgcattgcacagtagcctttttatgccttataatacaaccaatatctaactttttcgaaagaatccacagattccaaagaagaaagcaggaagtcatctatttaccactccgtaggttcaaattacctccattaatggaggctgtgtatattcctactacccatcattacccggtcatttctttgtcttgcaatacctagcagtgcctggcatagaggaggtagagaagtttgagtggacatttttcatctttatgtagagtgctatcagagcccttgagttgattacaatcagtggacacggacacatcgtgttttagttttccttccaacccctgattgttgtgtgttataaggcaggtcattgcaccttgctaaatctaaatggtttactttctgcccttgtggttcttttttctgtgctttcaaggctgattaatttcttctctgatatactctttcatcagatgtttggcaaaatttagtttaaattcattaacaaataccattctaaaggtcatgatggctttcctaaatctttatgtatttatcttacaatcactactcattttcctagtgtgtaacttgttgatggctcccaacttttatctctatctaaagtaagttgagtcttagagataggcaggggcagcactggactgaagaatttgtcttctttgtaatttcagacaattgctgcccctacaagtaccattataaatggcaattagagctgggcaggacagggagacagagagacccctgacagtatatgacattgcccttttgttccaatgaagtcaattcatattccagattgagactattttcaattaatcgtgctggttaatgtctaagagacactattatattagtaatcaagatatattgtttcttttgaacttccaatatattttggccatgcaattctgttggaagaaaaatggtaattaggtttgctcagaatgatttattatttacaagtatattggtatattgtgcttattgtttctgattcaatttttttgaggaacagaattatgatattcattatttaaaaaataaaaacattttaagagtcatatgttcataaagttctcagtgacatcatgatttgaattgagaactaaattatgtttcctgaataataggaaaacaccatttttaaaaaaaatctctgtgctgagtctttctgactggacaactgtgtgcaatggaaactttgcagctttacaaacctggatttaaataacaactccgtcactttgttgctttgtgaacttgacaagtggcttcacctttcagatcctcagtttttcagtctgcaaaatggggttaattatagctacctgagaaagtgttttgagcactacgtaacacagcattgagaacaggcctggcctggtgccggggagattgtaggcgcagagttaatgttagtttcttttttactcccatcctctctccatgacttcttcctcatatccgtcctctccaaaaaatgtccctgtttgggcagtctctcaacatatcaaaaaatatgaaaagttatgacatgtcatttgtcacatgattatgttctatctcattgcttagaagctggcacgttcaaaacaccataaatagtttttaaagatataactgtctttattttctcaacacgagtaatcttagaaaggctcaagaaaagaaatatttcagagttactggtgattaaaattaccatcaagtgtactggcaagctctgaacaaaagtacacttgtgacctgggctgtctggccacaggtcagtcaaagagtgacacttgtcagagagctggcgctcatttacaagacatcacacctgtagtacagacatcctgagtgcggtgctttgggaacttcacttttgaggatgtttgtttttctacctaatgcaagtatgaattaggtagcctataaaccagtatgatattaagattctcatagctaacagtatcttggagggttacaagaaagtcagtttacataccaatagtttttgcattatattatttttaaaagcatgtttatttatttgatcttcctggttgtatatattaccaatgaatgggcgcttcgtataaaaataaatctccttctatataaactatgagggcaaatataacttttgaatgtgtttagctgagagagtatttggctatttggattttaattcctatttgtttagatgctttgacctttaaatgaaactttgacttttctaagaaattcttacgtttttaaaggcccatcactgctattcttggtggtaaatagtaattccctttagaagcttacctatcctgaactcaactttgaattatctaatatttaccatgtgcaaactactaggctgggtactgcagaaacataagagtaaaagagtcaatgaaaataaccataatgaagcagaatgttatacaagagatattctaaagtggaataaccacattcgttttggatactgaattgccccatgggatagatttgagaatagcttttagcaaaaagtcatttatatacctatatacacacacatagttttaatcttcattcaatatatatgtatatattgcaatatatattatgtaagtctgtgtgtatatgtgtattacattgttatatattatatgacatatgcattgtatattatgtgtattgtgtattattatatatggtatgtattacctattatgtgtattattatatattatatatagcatatctatacatggacatatacacacacgtaactttactgagtcatagttaacattaaaacatctcacaaactgcatttatgtaaaaggtacaattgggtaagttttgacatatggatacacccatgaaaccatcaccacaatcaagataatgcacgtatccatccctactaaacgattcctcaatcttttttgtaatccctctataacatccgttgctatcccagcccaccccagccacagaaaatcttcatctactttctataaatatagaatatagtttttattccctaggcatttgtgaaaaatggaatcatgcagtacatatttttatgtctgatttctttcacccagaataattactttgagattcatacatgttgtagtatgtatcgagagttcattccttttattggtgaatagtattgcattgtatgagtataccagtttccctgacaccatttaaagcctttttaatcttagccattctgataggtatgtagtgctatcacattgtagttttaatttacttgttcttaataactaatggtgtttagttatgtttgcctatgcttatttgcaatccatatatcttctttggtgaggtatctgtatttttcattggactatttgttttcttatcattaagtcgtaaaggtcttttatgtactttagatacaagttcttatcagacatatgagttacagatattttattcatgtctgtggcttctgtttttattctcttaacagtaacttttgaagaacagaagttatatactttaatgacctctaacatcaatttttccttttatagatcatgattttggtgtcatattttagaattttttgactaattcaaggttacaaaaattttctcctatatttatttctaggtattttatagttgtaggctttacatttaggtctatgatccattttgagttaatatttgtgcatggtgtaagatatggatgaaaatatttttcttcctttattttttcctttgttcctttcttccttcgttctttttcttcctttcctttccttttttctctttctttctttctctctctttctttctttctttcttcctttctttttctttctttctctttctttttttctttctctctctctctttctttctttctctctttctttctttctacaaatggacatccaaatgtttcaaaactgttattaggaagactacagtttctccactgaattgacattaaacattgtcacaaatcagtttccatatgtgtgtggatctatttatgcagtctttaatcagtttcattggtttgtttatctatacttatttttatatctatgtttatcaataccataaatatacatactgcctcaacatagaaactctctcaagacagtagcagggacaatcataaacctcaccctacttgttttccatttttcagggatcactattcttcatcacttcatgtccaatgtcttgaaagccattgttttacatattttgtctgtttttatagttaatttaggaggaagactaaatatatttctggctttactattttatctggaagcaaaagtccaattaatggtaccataatattttatagtaattacaaataatgtacttatttcatcgaactgatatcagtcaagtttcttttacactagcaaattatccagctctaagattcctgttttctcctcacattacactcccatcaaataccacaagatgtttttagtctctttgccgcacatttcctccagttgtcccctcagtaactgcactctagccatatcagcatactaaatttcagagacctctcccatactaactactcctctgagtagtatctgagactcctctgagtctcagcttacatatcaggtccttagaaaggcctttcctggtcctcacactctcattaaagttacgcttacttttaatggcaaaaactgcaataacttttgcaccgattaatgttattatttatactgtttctaattatatgttaatttatttactcatttaacaacttatcgggctcattagaacatgatctcctcatagacagtgacttagcttgtctttccccactgcagaccaaattctcttaatgtattttgtgtctagcagggaagacagacattaatgatttctaacttaaaaagtgctataaaggaaaaagttaatgatatttaagagtttataatgaggggacctaatattcctgtgttagggttctctgggaaaatagtccttcctctgagacttaaaaggtaagtaatagctaacaaagagtgattaaggcaagaaagcagaaattcctacacttagcttatagaaaagacgcttggtaagagagaaagatggggctagaaggcaaggtggcaaccaaaacccagcttgacatgtttgaaatgttgccataccaaagaagaactaatcatattctgtattgctttggggatcggaggtgagacaagggaattagaacaacaattaaagtcaaggaattttggcacagtatcaagaagatctttctaacattcagaattgtccaaaaaccaattgtcttctttaaaatgcaataaatcctccgaaactggaggtgctcaaagtttgtatgatcattgcttaaagatgcagtgaaacagatgtctgtattaattcacaaaataatattctacttacaaatatcctgatgtataattcacaatggaacttagactagcagttgaatacggaatcatctttgattcatcacaattttggtagaccctagtttccaaatatgtaaaaaatctatccatttctttccattgtaactataacaactctgataaagtcattgtctcttatcacctatctacttcagtagcctttgttctatttttcccacaccctctattgccacatcctgtctattcatccatgacagagtgatgtttttaaaagaaaactgataacattgcatccctacttaaaacatgtctattttgtcccatatattatatttttgtatggagtgcaaaatgtatattggattataaagctccaagtgaagtgacgctgtctgtctccccagtgtcattttatgccactttttctgtcaccctgtgtgttccagcaacactagcttgctttcagcaacttaattgggccaagagttctcttccaccacaatgaatttgctcatgctatttcctctgtctggacatcccttctgctaccactcctccttgtctggctattgtccttcagatctcatcttaaaaatttgttaatcagatatgattccatagcactcaagactacgaagattttgttattttgtaccccacagcattgcataccctttgtgtagaactttcctcaaatacaattaagtgttttgtgttgtaattattaccataggctatgtctttccacttgatagtaagttccagaaggatagaaggatagggatcatgtctatggtggccattcatctcagctttgatctagtatgatgtctaacccaaagtgtattgctcaattaatatatgttgcatgagatttcaatgttataggatggattgggaaatttgtagaatcacaaaactctagaaccagaaaataccttagatattgtctagcctgtcccattaatcttatacattcagaatttgaagcttaaaagtattaaattacttgtctaaagttaataaaaagattaatggcagagccagggttcagtggaagtcaggaattccaactccgaattcactgccctgtccaatatatcagaatacctctctaacatggcattttcaatctcacaacctgatttttttacttattgagtaaaacaacagcatgtccagtattaatgagctgaaaagaggaaatgtaatttgatcatcaatagtagaacgaatggcagtttttttaacattgtgttgaatattatactacagttatattattccaatgttccccatgcatatttcctgtttatattctgctagagaccttattaatgagtatcatcactcagataattaccataaatagaattggactcttttgttgtttaaattagtctgtatgggagagtctagttgaggacttatctctctgtgacctcatgatatttgggagtaatatcagtagtatagcatttgcaactgaaaatttggctatgggattccaaatatataaaaaggaattttaacatattttgctaacaagtgcctgtccacatttatcgaacacttactctactgttgttcttccaaatttgctgttaaaataaatgatttaaatagtctaggacaaagaaataaagataaagggtatttttcatttatataggccagatatgatgagtaataattcaactcttgaggagaaggtacaaagctagaccctaaggtgacaactacaattaatagtacagggaaaagaattgtgttcatttttgaagtgtttgaatcatacaaccattcttattttgctattttcattttgtgaattatttgactaattaatgaaagaaatatggattcattacaaagtcagttaagtctaggaatatgaatattacgatatattccctgaattatcaataacttgtgatgcaaacatttagcatgttaatatggctgtgtttctcaacatcaaaaatattcttctgtcatcaattcatattgttgtaattcaattatagcatttagagtattgactaagttactgtaacacgaaaattccaaaaatgatggtggattcatcaaaatgatagttttattctccctcatgtaagagtcaatccattcttggctaacagggacctttgctccaggaggtcatttagcaatccagtttcttattgagttgctcaactatctcctagagcatagtcttatttgatcaaagagagttcatcagcacatttgtgttccaatctcatgaatggggaaacagagaaaatgaaatataagcaattttctctttaaccgataagactagaaagtttaacccattactcctactaatgtagtctcatgcccacacctacctgagtaggttgcaaaatgttgcatctagctgagcagttctgtgttccgataagactcgtggggttctattagtaagtggactaggggataattaataacaatggataggtatcagtctgtcagtttgcccttctaacaacccaggtgtccatgcaccctcatctttcttcataaatacactcaaatcctcttcaagggggcccacataaaatcttattcagttactgctgcagctgaaaatccaggactggagtgaaatatagtcttctctttcaggtctggaagtggctccttgtgctctggcatcaacttacaaacttacaagttacatatcttcctttgtcctgatatataatggtggagtagggacaggataactgcaacaaaaactcccattcagaaacataaaaactgaaaagcacccagctgtttctggctcacagtaaatctcaaattctcctgggtagaaatggtgaatactctccatcctgctgatgtattagttgtttgggttaaccagcctcttgttctgctctcagtgagtattttcttcgtccattgccccctgcagctttgactttacatatttgggaggttcttcttcatccactgtccacatcagaaggtggcaagagtgagtgttctctccttggttcggcttggaaggacagaggattgtgttagagagctaacaacaaaggtcgttgtataccagccttgtggttcttatgataataaaattctttcagacccttagtagtattcttgcttatttgcttccaatcacttccatgtggagtaaccacagcaaaaacaatcttttgagcaatgtctatagagtctatagatgctcccctttttattatcttctcttctctgctcatctttccttcccttaacttaatataagcgaccttaataccacccaaaactaccgctctttacctctgagctgactctgagggacaatctaatatcatgctcgttcatgctcattgggatatggaaacagttagcttttctacactctgaagtctcaaattaggggaattttaatctattaaattgcagatcacaggcagagagattttccattagcagagctttcttttcttttccatttgcaaatgggccacttcttgcctaactttatttcatgtctcttgtaacattttgctgaaagttccaagtagcagccaaaacataccaaaaatacgacattaaaaaaaatcctgttctcctagggctacagcttggtaataatgcagtatatttccaagttggcatatgttttgtaatggcatatcaaaggacatcactttctagcctgcaggtcctttctacctgccccctaatgtgctaaactaatgtcatgtattttgttttttattatgacaatgccccacttgcaggaaccaatttctataataacaggctataataagttaagcagctgtaacctaaaatacggtgccttgaataaagcagtttatttctcataacattaaagaagtgaaccatataagtgggtagctacaactcatttacaaggtcatctaaatttttaatatcttatttcttcattattcttcagataatatctttcattatccttcattgtccttaaattcatgcttaaagcatatttccagcctgtgaaataggagaaaaaggaaaatgtggaagaaatttcctttgtaaaaggacatacacatctcttctgctcacatctcatttgtagaaacatggtcaatgtctaatcttgacagaaagagaggctaaaacaagtaatgactagttcacagctataatccagctgaaacttagggggttttgttgctaaatgaaagaagagcagaatgatggagaacttgcaggctatgtgctcctccagtgaaattccactgatatgaagacatttggttgacaaataattgcatcaccatataataattgaacacatacaaattttaagaaaggactatgaaagaccacaggaagcataatgctgccttctgtaggagactgaatcaaaagggtctccaggcaaaaaattgacagaactgacagaaatggtaaaaaggaataaggtacaaaactttcttcttaaccaaaaatttcaatagtagaaaagaatgcagaaccctaagatgcaagattattctccttttaaacatttgatcttacacaataatctttcaaagatgttgaatagtcctgatatgctaggcaacacataatagaatacattacttaggggagtgaattcttaggaggaatagtaatgaaatatgacaggcataacatctgaagtacagatgttacattctatgccatgtaggtaatttacctttctaatagaatcttattcctgtaatagtttttctctcaatgtaacacagtattgaagtccaaggttagaatgataaataataatgagaggtgctcaagcattatttttaaaaaattaaatatccactgattaaataatgaaccaggcattgtgctaggccctgggattacaaagattaattccacagtttctttgactggcagttgtctgattcccatggggaagacagataaaccaacgtattatacagtgtggtatgcactaacattagagacatttaagctattaaatcgatataagtaagagtgatccaattgtgagaatggaaacaaaaacaaaaaatactgtgaaattcccagccttaaatttttggagagtaggaaagtttggctgaaggctaaatatcatgccagattgttgaggaagaagacaagacaattgtcaagtttatttgtttatttatttatttctcttattcctgaacttcttctgtaacaagttctaacctaaaacctttgccacactgttggcaattagaatatttggtgaatgctgagttttcattttgaaaataacctaaactggtttcacatgttagacattaatttatttattcatttgttcattaaatatattttgagcacttactatgtgccaggatttatgtaatgaagaaaaatttcttgctctaacaccagtgcagcctctagttcactgagctgcagccaaaggacaaggggtgtaagtaaggaaatctctattccatggctcctacaaagtggactgcttgcaaatgacccatagtaaactgcccaggaagcaactagctaaaaataactagctacaaatgcctcttgcgagtgcaccctctaccggaggggtaaagaaacctcaccgaatgctacaaatgccgcttgcaagtgcaccctctactggaggggtgaagaaacctcaccgcaagccttatactgtagtgcttcatgaaattagatattatgaaaagcccattgaacttctgattcaaaaacttctttctagcatctggtgtgaaaaatttctcaagacttcaaaataggtctgggcttccagagtgcagctattggtgctttgcaagaggcaagtgaagacctatctagttaacctttttgaaggcacaatcctgtgtgttatccatgccaaaagtgtgacaattatgccaaagtgcattcaactagcatgccacaaacatagcaaatatgcttaagaatcccctgtgatgggaaacatttcatatccctcggccctcctgccgaattcttttcttcctattattagtcattctgaacgttatttttttcccatgggatccaaaggtacccaaatatatgcttgcaagtggaaaaatagggtacagaaatcagttatttgcagtttttctattttcattcgtatgtgaatttttaatataaacgggatgtgaagcattaacgcaagtcaacatacttcggtgaacaagtttcagcaattcaactttatagcaattataaataaacctgttaagttattctggacatttggattgacgttgggttggcaagtaaattttttactgacagcaactaaatgatgtttatataatttttatcatataatagattctatctttttactatacttttctaagttgtcccacatgcaaatacatgtttttaatgttatctatcttctgtgctgtgcctataagtttgttattaaaatacattaaacaacaacataaacttcttttcctcaaagtacttctagtctagttggagaaacaacctagaaaatgcaccaacaaatggggcacaataactactctgagagagagtggcacacagtggacgcaaagaagaggttcctgatgcagctgggaagagtctacatgggcctctagcaggagaagatactggtcttgagtttggagactaagtaagcatctccaggtaaggtgtgccatgaaacaagtaaagcatacacataaatggaaatgtgagaaaacaggatatgtttgggaaatagaaagaattaaagaagtacagaatatcatattagtgtaaaaaagaaactgtcagtgtgaaataattattggaagagaagtcaggaaatttagattctcctactgtctttcatttctttcattaaaaccattactgagaccctactgatgttccaagcccagtgtgtggctctgggaaaacaagaatgaacaaaacagacatgggatttgcctttgggaatttcacaatttagtcagatatagacagatatagtcattaatcaaacaagctcatcaataaatgtataaataaataccctctaagtgtgcaaagacgcagtagcatgaaggtgctcggtgagctcaatgagctgagaaaaaggctttaatttcctttctgtaactaaaagttatgatgctttccaaagcctcttccaattccaatgtttttatgactgtaaaactcatattatttaatgtggattctaatagtttgagtttaagattttcttaatatattcagaaagtgagtgagactatagaagtccaatcatatttcctcaatactttaaagctgtttgaagatgcaaccagaaaacatggattcgggtattaagaatattttttcagacacttctgtttaaaactttaagaacagtaacatttcacacacatacaggaattactgtgttaatagatgtgttcaggaaatgccatgcaagataaagcacaaatgatatcataaacaatagacacaacagtctttggagagtgtgcactgtcttggcaacacaaaggcctgctggtaaatctctacacacctgggatgactggggaaagctgccaaccacaactgcatttgtggccttaagcattagaactaagaacaggtagaagtcctggttcaacaatgactacatgaagtagaggaaggagcaggtgtattcgctcttggaaatctactacttaatatcatggttactttgggcaaggtagttcaagttagttactgtgcatatgcctcagttctgtcatgtataaaattagaatgaagaaaataatggccttacctaccttcctaccttatagatttaaggaacaaataaagaaaaacaataagagggttgctgtgaaatgacagagagaaacataaagagaggagagagagagcttctttggaagctgaaggcagtcagtatttcttacatttattttgtaaaaaatgaattttctttaataaacacagaagtgaatgtatttctgtgactgttgttttcagtttgcattttaaaaattgccctaattgcagcaaaatttgactagtctgtgttggtttgtatttattttttctctttttttttttacagctctattgatctatcattggcatataaaattttatatatttaaggtgtacaatttgatgttctcatatacatatacactgtgaaatgattaccatgttttttcttcttgaaattttattggtctatgaaatctagaagtttggaaaagtgtttaatgtagggcaattctaaataaaaattcattattattcagttttattcaacaagctttcattgaacatcttcattttgaagttcttaaattgccttcacatttgtaagccttattttccaacaaagtatctggtccttaagggcataaggacctctccaatgtcttcagaatttctcaaggagctaacccagccatgtgggtgcacggtagacattcctaaatgactgaatcagatgatggtctacacttgtttttgtgtagaaatgagaatgagtcactgtctggaacttgtcccccgacttgggaatgttaagcctttggaccacttttccctggctccctggtgggcctttcatccttgcaagggcctcagggacatgatggagtttccttttctctttaatgtccctttcggttactcaaacctctaggattcttttacccactctaccagtttatgctgcatactgggatggagctttcctaggttcctcttttctcttcctgaaaaaacacacaggctctttttacattgaattttaatactaatccctcctggtaattagacatgaaataacaaaaatggtaaactatatcaaattacaatggttaagaaatcttactgaattctatcaggcatgtttcctggtctataatttttgacttcttgagggaaatgctaactaggagtcccaaacatttattctttaaggtaaatttctccagaagtcttattctaaggctagcatatccaatcagagaaagaaaattaatatgatctaggttaattaggtgctatcctaggctaaataatagccacctaaagataacatatcctaatctcaggaacttgtaaagttactttataaggaaaaagggactttgcagaagtgattaaatttaagtatcctgcatagggatattatcctggattatctgggtgagccctgaatacaatcaaaagtgtcctggtaagagagaggcagagggtgatttgacacacacacagattgaagaggaggaggcaatgtgaccaccgaggcagagattagagtgatacagccacaaatcaaagaatgtcagcagccactggaatctggaagagacaaggaacagattctctttagcacatcagaaaagatggtgcattagttgcagtggctcatgcatgtaatcccaggactttgggaggctgagtctggtggatcacttgaacccaggagtttgataccagcctgggcaaaatggcaaaatctcgtctctacaaaaacaaaaaacaaaaccaaacaaacaaaaagcaaactaactaaaaatgaaccaggcgtggtggtgtgcacctgtagtcccagctacactggaggctaaggagagaagatcacctgagcttgggtggtcaaggctgcagtgagccatgattgcaccactccactccagcttgggtgacacagcgagatcctgtctcaaaagaagaaaagaaaatattgtgatctggtgaacaccttgattttgaaccaataatactgatttcagacttctgacattcagaactgtgagacgataaatttctgttgttttagcccatgacatctgtagtgatttgttagcacagccataggaaactaacagaagggcccacttgtcttaaattcctatcgtttaacctgtggggttggtaacatccattttaaggggttcttgccccgtttctttaccttttctggtcattaattgtcaagctgagcagaaactatttttatattactggagagttatgcttgagaaattgggatttgagaaaggcacggaaagaaagatgatatacttaaccactattccttcatctaataaacgttgtgtaaattcctactatgtgtcaagctatgtgctaagtcctagaataaaaatggagtaagacaggatttttgtccttaagaagttcagttgagtaggagaattagacacacacatacgtataattaaattaatttgtggaaaatgcagtaatgattatgtagaaagagtattgtatttccccagtgcatttcatattttgaaaaacactgtctacaaaaaagtttctgtgtttaagtaatatataataggttaagaacagttctaactgccaataggttttataattaacataggaagatcagtgttatactactagcttaccattatttcagccaaaaatcaaaggtatctgtcatttgagtttttattgtaaagtctgttcctggagaaagtgtgaattttcttataatatttaaaatactgatgtagctacagaactctctccccattactttcaagaatggcctttcctagtttgggaaatacagcaactatgtcattaaacaatctggttggccaggcacggtggctcacgcctgtaatcccagcagttagggaggccgaggctggtggatcacctgaggtcaggagttcaaaagcagcctggccaatgtggtgaaaccccgtctctactaaaaatacacaaattagctgggcgggttggcacatgcctgtgatcccagctactctacttgggaggctgaggtgagagaattgcttgaacccaggaggtggaggttacagtcagccgagattacgacattgcactccagcctgggcaacaagagcaaaactccatctaaaataataataataataataataataataataataataataataaaacaatctggcttagagaaaattgtattgcaaacaatctcattaatgagagttcctgcgtaacaggacactagctctgtcccttggggatggcttggagtactgtttcctggtaaagcaacataaacagatctcagtcccctcttacagagttatgaaataatagccataagtaataaccaacatttatataagcattccatcattttacaaaataattttacaaaagtaactgattataggttgttttaattggaagcaaacccagtttcattacctcaagcaaatttcttcatctcttttagcttccgtttctcatctcttttttttttttgagatagagtcttgctctgtcgcacaggctgggttgggtgcagtggtgcgatcttggctcaccgcaacctctgcctcccaggttcaagcaattcttctgcctcagcctcctgaatagctgggactacaggcgcctgccaccacgcccggctaatttttgtatttttagtagagacggggtttcaccatgttggccaggatggcctccatctcctgactccgtgatccacccgcctcggcctcccaaagtgttgggattacaggcgtgagccaccgcgcccggcagtccgtttctcatctttaaagtgagagtgctaacacgcacatggagggctactatgagaatggagtgagattttgtatatgaagtagcaaagacagagcctgggacttagtaggtacattattaagagttggagccattttttaaaccttttgtctttttgttatttttgctgttctgaaagtctctaagcttttaaaaatggtctcttattttactattcttgaattgtttcacgcttctcaactcatgacaagaacctattctgccaatgaacctcctgcccccatctattgaaattaaagcttaggagcaccagtgcatcccagaatttgacttccttccagtggagagaccccttgggtttttcgtgtgctctttccctgatcctttaggtgtcacatggtcagaaagaacatagtattatttataaacaatatgctctctaacttcagaaagatttaggacagctttctggatttggtcatgcatgaaacaggaaaaacaggctattagaaaattgtgtgaagtctaacagggacttgatatgaattcattttgatttttaaaactgaggactgcaatcattaatcagttcattaaattaattggaataagtatattgcatgtagtgagagtagtagtattttttgaaattttagttttaattatatcctatggcctgtgttgtaagattttttattttaagagtttaaaagccattcgattaagcaactagtagtaaacttttctgtctctcattagttgttaaatctagaaaagttattggtttaacaaacctttattggatatctattttgcatcagatttttttctacatgaatgacatttttttctctctcttttctaatactgatttgttgcagtgtcgaataggtacctgggtcaactccacacacttctcactcttcactggacctctggtacaagattgagaggattcctattacttacaaacagactaggtattaaaacaaaaagattcccgaatagagtgaacctaacctagagcccctaagaattacatcagctttaaccattaattccctgggttcttcttattcagtaatgtcttaaaacctttttatcagtatgggatgggcgggcaaggggataaagaaactggcggctggtgggaagccttaggtaaggctgtcaggggggctttagtttgggagtgggataatttgctgaggaagggtgggagaaacgtgaactagcacacaaaaggctgtttccggctcaaatttcgttaccaaggctctttgagatgaacttttttgggggaaaacaatcagtctaaaagagctgtgtcttcttgtgtgtgtgtgtgtgtgtgtgtgtgtgtgtgtgtgtgtacaagggggcggcgagggtccccacttttagtatgagtagcattgttcacatgtttgccagtattttggagcctggcaggcctgggtagaggctgcgggggacgcctccaagttcccacccgggacatcctgaacagcagcagccacaacaacaggctcgcccctagacaaaggggccggcgcggcggagcagactggtgcagcctgggccgcgcgctcagagcgctgggcgtctgggcagctgagtgggcagagctgacccggtgcgggtgggagtcagggcgcccggaaaacccggctctgggtagcagaccccgcccgggctggctcggcgccgggccttcgggcttccactcagtctttgaccctcggtcctcgctcagcggcccggcaggccgcacaactgtaaccgctgccccggccgccgcccgctccttctcggtccggcgggcacagagcgcagcgcggcggggccggcggcatggctgtgtcctggaggagctggctcgccaacgaaggggttaaacacctctgcctggtaggatggcgggctaggctctccttgcgttctctctgtcctgcagtgattttgattcattctctgagcgtgcacgggtgggaagctggaagtggaagttttgtcttaattcgaacattctcaacttacaaaactttatgctggagataacaatgaacactccccctcccaccccctcgcctgtcccccaaatgcatgagaatttttctgcacattgatgggagagatgtggaggaagagggaagaggtcattttccgtgaatacagcttttctttttaccctttaaacatttttgctccctttgttcttttcccagattacttctgtttgcttggggtatggtgatgtcattaatttcttaatctcattttgtacggcaggggatagctgtaaatcatttaggaaacctatttgcaacccaaatgcttagtctcaggtgaaagggctgggtaaagtcagatttgttttcctctgagtggttttcagcttgctggttaattgaaaatgctttctgcagttactgatttaggttccattgaaagcactgtgtcgaagaatttacctgtggtttctattcatcaggtaataattattttcaatttttgttttctgtctctcatgtctgattggtttagttcatctggctctccatgaatgtcctgcttttctggaaaaccttcttgctgtataaccaagggccagagtatcactacctccaccagatgttgggggtaagtaaggtgaacttggataatctggtggaatgggtttaacactggcagacattgctacaggtttggtcagttccattcattaaagaaatgtgcactcttcactttgaaaacctttgttgttctctaaagtggtcacattttcctgatttatcatttacacttgtacaagttaaaaagattgactctctcaagaaccaaaggtaatatctgctgaagtgaaacgaatgaacctgccagaccaggttattggtgccttaaaaaaattgctacttattgccagctgctaagtaccctgaaggatctgattcactaggaggatcaaccaataacaagcttttagtatatacttatcagtgcttttagcctgctcatgagcttatccagaggatttctgcactgtttgtttttactgacaactctcacaaaatatgggtctaatggggttattcatttctgggcagttctcagtgcttgctttgggttagtggctgatgatattccagtattctactataatatgagaaagatactgggcaaaacttttttctgatttattttatgttaatatttttctttcttttctatgatgtttctgatttcattcttctgttccatctccttcttatttgactgcttaacagaagatagtgtcactgaaggcatattactttgcacaaggagattgcgttttctttttctttctttctttctttctttttttttttttgagacagagtcttgctgcgatgcccaggctggagtgcagtggagtgatctcagctcactgcaacctctgattgcctggttcaagcaattctcctgcctcagccttctgagtagctgggactacaggcacgcaccagcacacctggctaatttttgtatttttagtagacacaaggtttcaccatgttggtcaggctggtctagaactcctgacctcaagtgatccgcctgcctcagcctcccacagtgctgaaattacaggcgtgagccaccatgcccggctgagattgcattttctaagcaacaagcaaaaagtgtaaaaccctgcaaaaacttagggaacctgaaaaaatagattttgcattttggtgagtgggggggtgcagaaaaaaacacattttgcttttttattttttttcatggtttaatgactacttaaaattaagacgagctcagacaaattcagtggaaccagctctcccttctatgttttacatggagagatcttatttatctgtaattctcagtacccagactagtgattggcacatattaagcctgcaacaagttgcagttgaattaattaattaattttttatacaacaaagtaatatcataatctgttgatcacacactttataaagtttaacttctaggttttaagccaatgggttgaaaaaaatagtctgtaaagctaaacccatttcatttatttctttcatccatccaatccaggaactgtcttgaaacctatacatttcagatgggcacccagagagtaagacctcacctcgcccctcaagttgcttacaatataatggaaaaaccaacaaataaataattataattcaataaacaagaaaaggtttcttctaataaacacatgaggtctgataactttttggttttgttttctagtatttccccattaggtgtaacttaatgaataggacgtttttcagtggaagctttatctcatctattacataacttgatgaacaacttggagaaaactctttagatatagaatggtaaaatttgctctggatcacgaggtatttgtattaatataaaaatctaagaactggaaatttattgcaataacctagaaagccataactgaactttggattttagctttgtgagatagtataagctaaaataacatcttatttcttaaaaaaataattatttggaaaccaactcattaattttcatgaacttggatactgtataactgaatttcaaatttaatttggtggtaagtcagatatgattaagatcacatatgcacagaaacataaaccaacaaatttggaaaacatttaaactatgtttcacctctctacttccatcccacttcactgcttctgcttgaataacagacagggtaatgagcttcaaggactgctgacacatagggctcaataaatattgatcaagggaatgaagaaaaaaaatgataaaaggaccaaatggaagactaggagcataaaggataagaaacagattcaagaaaggagaggttgttataaattagtttttaagaacacacaagtataattatagtgagttgatatttgagctatctggtaagtattctccattttaccaagagtcactgtggacaggaatggtctttctacatgctgagagataaaatatgacttataaacttctcagtaattatctgttatgaattttccagtcattaatttatctaagctattttggaataggtattttcagtctgtatattaccttttattggaaaagaaactccttctacagttttactatctatgaagtagtgtttaattttatgtcctaggcttatcttttctaatcttataataagtgttgcattatttcatagagtaacaatttgcaggcacttttcaaattgcaaagaaatgcagtataacaaagagatagaattaatttttaaataaatattgctggttctgatgttttacatttttaagaactatatgttattaacttagcatcttagagtgatgcatcttagaacttagcaaacacttggtcccactggtatacgcatgtgggattcctgaagagagtcaaggtatattataagtctcttttaggtggattttaggtttgtaaaaatcatgatgttatttctggaaatgtatttcattgtaccatttaaaatgcaaatagaaacaatactttcatggctgaacattttgataatagctttgagtataaagttgctgtcattcgtctgtgaaatgtaaggtaataacaaagttgtactagtacaggaaggacccacagaatatggtccatttattggaagacacagacaatgagaaacagttaattcttagtaattgcttgaaaatctctattttctattgaagaatgactttttattcaaatgtttacttatacctgtgatatgccaggaattttacaaatgttttgtttaagctgggaaactgttctctctgttttacatacaaggaaatatgggctgaggaagctgtatgactcgctgaaataccttttaatggtcagtgtcagagctaggatttgaatacagccctgtctgacctctgctttttcatcatactacgtagcttttctaaacgacttcactggtccatgtcagatacttatactactggttagtattaatttttaccagtgctgcccaacagaaacataaagcaagtcatatatataatttaaagttttctagtagcacattaaaaaaaggaaaaagaaaccagtgacatttatttaataatatgtggccaactaaccaggctgtaaaagagacatcaggacatgggtagtcctcttgctcctcctctactaagcaggaattgtcaaaggatgggaagttgtggaactacaaaaattattggtttgggaggccaaggtgggagcattgcttgaagccaggagtttgagactagccagagcaacaaagtgagaccccatctttacaaaaataaaaaaaatatacatatatatacacatatatacacacatatatgtatatatacacatatatacacacatatatatgtatatatacacatatatacacacatatatatgtatatatacacatatatacacacatatatatgtatatatacacatatatacacacatatatatgtatatatacacatatatacacacatatatgtatatatacacatatatatgtatgtgtatatatgtgtatatatgcacacaaacacacacacacacacacacacatatattagctgggcgtggtggcacatgcatgtaattgcagctacttggaaggctgaggcaggaggattgcttgagcccaggagtttggaggcagcagtgagctatgattgggccactgcattccagcctgggtgacacagctaaataaataaataaatatttaaataaataaatttatttatttatttatttaaataaataaataaaattggtatagaactataaaaatctccctgacttctgtctcatcttctgagttttctgaaggtgggaatctttgagaatgaaggtgaaagtatttacttctcagaactagagtatccacttttatttctgggttattattctcgtaataaaattaaagagtaaaaaaaatacatacgaattgatagaaaaaataagatcttaattgctagaagataaaatataacattgggattaatatgttttattgggggttctcatcatgattatccttccccagactggtctgatccagagtggaggcaacgtggtcatggctggtttatgcctgagttaatgtgctaatcagactgtgcacttcctaggagatgtttaattgtgacatgtcatgagttttggaatcttaaaattagctaagaggaaaaaaaaatctattgagagaagccaaaatgaacaccgaaacaagcaaaccaacaaaccaaacaatagcctgctccactcccccatggcaaccttttaaataagtcacttcattgattgcttaagattaaatccattttcatttatttattttcaagaatggaaaatgtagttgcctgaactttatagaaattagtaacaggttgtgttcaactctcagaaatgtagttttcttttctttttttggaaatattggagcagtttaactcaaaacaccatttataggagctcttgaattcatgtttacctgttttgagttgcgttttttacattttaataattaaagaatatcatgtaattcccataaacattttaacttgaaaagagaatgattttatgatatcagattcaatgtgtcttagttatatatatatattcaatgtgtcttagttatatatattatatttttccctccaaactattcaatttcaaactagttattcacatggtgtcaggataagattttaatttttattttgcttttattcacaaatattgttttagatctgctgcatgatcttgaagctttttttaaacttttattgaaatatctatgctcttgagcattcagattctttctagtgaaacactgggattatctttctttagtcaatcattatccattagaaacattaactaatttaccctctcaagagtcctagaagttatatcataacattttacagagacagaaatctgatgtcatgtgaatttcttaaggtcagagactggagtctctggacaaatggatctaggattttaagtcaatgttagtttcacagctggcctgggcagctttaattctgctgagaatgaatatatgatccctgttactttcagaagagatttggtcattaaatcctaattatacagactgtaaaatcactagctagagttgctcaggcacatgttatgataacaattcaggggacatttttagatgagtgttattttgcttatttgtttttattcttaacattctgttatttagacacaattttcttgtttattgatgggtgaaatgggttatatttctttgatgaaattatattctttatctatttacaatagacactgattcatagagttttagacttggaaggaaactttgatatctttacttaacttttcattttccgaaatggaaaaatgagattgaggtgatttgttcactatcacctactgaattagtgacttggtcactatttagtctattgttctccttagtccaatattagccactataatgaacagctgtatgaacacacgcaagaacattttaaaccccacactgtatggactactagctttacattttaggtgaaatgatactttaaaatgtctagcaatttaagaagctagcgaaaatgattgatttactctcaaaataaaatatatttttagtattatagttgtttgagacttgccaataaattgtgaaggaattatgagcatttttatttaaatttattctgatttcacaatacttttcagaattctaaggctcaatatttaacctcgttgtgatatatagctaaatgctaactgcataattctcctttatcaatatcatcccaaacagcatagaattggaagttagaatgaatctcaaagatagtcaaatctttattttttaataaatgatatgaataatatcaataacagattgtgctcagtgataactggctaatactagactttagtctaagagctttgcactgattaatttatttaattctctcatccatagtatggaaggcatgatttcaagtttttgttttgtagctgagaaactgagttagaggggttctataacttgctagtgagggacagaagcaggactcaagcccaaagatcctggttccagaacttgtattcttgttttataaaattttaattgacaaatgccaattgtatttattgtgtaccacattatattttgaaatatgtgtatattgtgaaatggctaagtcaagataattaccatgtatattaccttacatgcttatctttttttgtgataaaagcagaaaatctactgtcttagcaattttcaagaataaattgttataaactatagtcaccatgttgtacaatagatctcttgaacttattcttcctgtctatctgaaattttgtatcctttgaataacagctacccaaccccctcccacccccaccagcacctggtaactaccattctactctctacttctgtaaattcggttacattctttcttagatgacacatataagtaacattatgtggtatttgtcttcctgtgcctggcttattttacttaacttgatgtccttcaggtctcctttcatgttgtcacaaatggcaggatttccttcttttttgtaaagctgagtagtatcctattatgtatacataccatgttttctttatgcatttatctgttgaccaaatttgtattctgagccattgtgctctgttgtttctttgcaacattaatattaggttgaatcatatagattggtagatcagaaacagtcaaaaatcagccattttatatggctcaacctaatagcaactgttaccatttattgattatatatgacgtgtcagacacagttcttggccccttttataatctcatttaatccttatatttaattgaatccttgtaacaacagtagaatataggaattattgatttttacagaattaagaagcttagattaggaactatttgctttttacagaattgagaaactgagattctgagtggttcggtaactttctgagtagttaggttacatagctgactagtagagaagcccaggttgagcccacacctgtctgaaactgaacaccatgctctcaatcactctgctttccaggtgaggttctgaaacagatagtgttagaacctgcaattctctactgttgtctaaggtccttatacattttgccatggtggtgctgaatatactgtttgtgtttccctctgtttgctgtttgcatgttagtgtgctttttgtatctgttaagaagtatttgatcagaagtaaattcaagcatatatgcattattcttatatatgaggtggacttgtataactaatacctactctgttagtttgctagggctgccataacaaagtaccacagactgggtggtttaaaggaaagaaatttcttcatagttctagaaactagaagtccaagatgaaggtgtcagcagggttggtttcttctgagggcctctctccttgacttatagagggctttcttcttccaatgtctttgtatggccttccttctgtgtgtatgtcttaatttcttcttataagggcaccagtcatattggattagggcccatcccaatgacctcatttaaccttaattacccctttaaagattgtgtccaaatatagttacattgtgagttaaattcaacttggtacaaataccaactttgtcagtcttcctctggaagctaagcatgcattttgagaaattaatttgaagttaatgtatttttttttctccttaattgtagaagcccagctgagcactagcattccagaatgacatggcaaaagggtccttcccaggcctttttaggaaggtattgtaatgttcctccttagaggtttgtcgagctttattcttagccctaccctacaactattttaaacatgctcttacacaaccctttattccctccattacctcaaagaagaaaatcagataaattagcacctctgaggagtagcatcaatattttattttgattttttagatcttggcatcaagagtatgaattcagggaactgactcccagaaaaggaagtagggaatattgaggaactactttaccttgcacaccactgaggccaataatagtagcagtcgtcgtagccctagtcctagtcatagttgtatatactttcttctgggcaatgctcagcctggagggagaggagcctgtagaactgtggactgttctagtccatttaccctgtttgatggatgaatttcatatagttaaatgctttctttatggactcagtgcaaagctgaatgtggaatgtaggtcctctaactcctggtcagtgtttcttcatgtctatcatgctaagcattgtgtttatcataaaactgattttaaaattgcctaagtaattctggagagaaaaataattataatttcttactgaaaaggtcatgggctttggagccatatggatatgaatttcaattgtggttaagcatttctctccctttgtgattttgatatactattctctcagcctaggtgtaaaccctactcataaaatagggcttaagccctactcttagtttagatggaaggacaacatgagaaaatgcaggtgaagtgcttagcacttggtacataggcattcagcaaattgataactattactataaatattaaataatggtaattagtattaatggcatcaatattatgaatagaaccaaatggtaatattgtattgtgtatatatatatacacacacacatatatatataacatatatatgttaaaaagaattcagagacataaagatggaagggatttgctgagcatacagatgctgagcatatgagatgacacctaggacagagatttaccctttgatctattatttcagtgctcacaagggtgcttaataaatggctgtttgatgatgaggttgtatgtttgctcgtcagtaggaacatgttaccttcagtcctttggttgacctttggctgcctccctgatcctctggagagaggaaggctatttactgctatttgctattggcaaaaagtttgtggcaatttggctatgattcttgggtggaattttagtttgaggtggaacatatttcattcaacaaaacattacttaatactttttattaatcttcactgaatcttggaatttcaacagataaataagataaattacctatctcagattactataaattttaaagaaaattaaaataaataataataatagctagagctagctttcattgcaatcttttcatgggcctgacattgtgccaagttcctgttatgttctttgctgcagtctccactattctacaaggtaggttctattcatgagaggaagctaaagaacagaatttgtaagcaatttgcgcattgattataagcacctaacatgaagtctattccataataggagctgtaaaaatgtcagtcgtcttctttcctccctctgctcttatccttcacagcctcataaaataattcaccttactgttttataccccaggaaaacatgatggaaatattctacttatctcagaatattgtgctgagcattatgacttaatacataagaaagtagtttgaagaattaagtttcacagatgtggaagactgttgttatgtcgtgtttttgtctcctatcatttcacaaagcttttaaggctccagtcatggtgccatgacattgttcccctggacatcattaaggaaagtttgaagaaaggaatgagacgtttgtcttcatgccaaaaaaaatggcagtcaacccttagcatgcaatatgctttacctttgcagtgtgactgttgaagtgggatcgtgaaagtctgttacatgttgtacttaatagcaaaacaagtatatacagttgactctttaacagcaaagatttgaactgcgcaggtccagttacatgcagattgttttcaaccaaatgtggatttgcaggatatgaaacccgcatatactaaggaccgacttttcctggaggccaattccatggggcccactggggcacttgaatattcacagattttgttatatgtggggatcctggaaccaatcccccacatatgccaagggatgactgaaagagcaaattacacaggtagtgagtgagtctatgtgattcctagaattacatcctaaagcaagtttgtgatataataaaacccgagcaatgcgataaaaagttagtgtctagtgaaaagtagtttactttcagttctgacaatgagactaaaggaaaagtaaataaaggaaaagaaggactttgctcaatcagtagaaattgtgttcatctttagaaattagaaagttgaatttgacaatggctctcatctctaaatggaaactatcaaaggttttcatggatatgggaacccatgaaaggattgttcaaggtctccagacacatatcaagactttcagaggtctgatatattttaagggaagaagagatgagtgatataaccaaagtataataattttatatagctgagtgttttttttctaatggaggcattttaacaatagggtataataaagaaaagattatatggaatgcctttctgactatatctcttttctttatgatcaaattttcaaatacctgatttcaaattgcaaataatctcattaatgtgatcatagaaagctaaggtccggtgggaggatctggagtggcagtgatccaaacaagtttcttttatccccatgctatacttttgattctctttgtaagcttccttttcttccaatatgtcttcctttacgtgcttttcctttagcatcttatactgaataaaatccctgctactctaccttatatggaagcatagacttcaaggagggtgaagatctcataagatgagaaagttgtagaacaagaaaataaccacctattgagaatacttaggagataaggtgatgagattacttttatttctcactgattttccttggccacatttcattttttttttttttaagatgaaacaaaacaggatctcattatgttgcccaggctggagtgtagtggctattcacaggcatgatcatagtgcactacagccttaaactccttggctcaagtgattattctctggggttgcagatgggcttggactgtgtagaacccatcactgaactaacatttactattttgattttgtacatttttaaaaaacataagagtgaaagaatgagtcaaacgtaaatcttggaagagtttagtttatgggctgagaatggatctacagggtttctttaactttgatctacttgaagaaaattggtcttagacttgtactgggtttaaatgagtgtgtcatgcttgaagaaaatacattttgttcagtgcacaaattttaggtatatgaaagttaattcgttaaagtcctttatgaccgtcattctgattcttgataaaatcaagtgtctgctatcaccttttcctgagcacatagtgtctatcagctcaaatatcaactatggtaatatttgtgaaaagtcgacaatatcagtgagagtggcatgatgtcatgaaaagaacatggattttgtggaaaattgatttaagttgaaatctcaacttcacctcttaacaaatatacctgtaaatgatttattaaaattttgaaagccttagttttctcagttttcagttgagatttatattattaattgagctacatgaaaatttcaatatagaaacattttgacttacaaaaatgacaatttaggttaacctgtgtttagtttaacctaatatatcgcttataagatttttttttgtcaggggacaggggcagggaaagagaggaaaagattaaccaaggtgaggaagaaatgagtgtaagactctcaaaaagtgttaattcccttcatcctaacggcaagttatagtagacaaatttatgacaatgctaagacttatctatttcagaaaacatctttggaattaagaatgttttgaagttgaaatttatttataaacatttgttaatgattataaaaatttccaacagttaagagaaaataccttctagtttagagcaaagcatgcattttgaagtgatatgaaaaaatattttgccaatgacagtatatattattttcttagttagaatttcaaaaatatttaagctcacagttaattgttttccaattggctgtggtttccacattttagctcccaaattcttggcctttataaaaccttcgtcaagcagctcataaattgatatacacatgaaaaagacccattttataggagagtaacagtgaattatttccataaaaacaaaaaagttttaaaaacttttttgatatcaagtacaggatatttaattaaacatatacctcagttcataacacactatcctcatgggtctgtgccagacttccttttactttcttcttcattcattcattaatttatcaatttaatcattctccattatccaatcccactctttcagcggtccccagtccccaagccacagacagagaccagttcgtggcctgttaggaaccgggccacacagcaggaggtgagcagctggcaggcaagcaaaacttcatctgtatttacggcggctccccattgcttgtattaccacctgagctccacctgctgtcagatcagctgcagcattagattctcttaagagcatgaaccttattgtgaactgcgcaggagggatctaggttgcaagctccttatgaacatctaatgcctgatgatctgtcactgtctcctgtcaccccccagataggaccatttagtttcaggcaaacaggctcagggcaatcactgattctccattgtggtgagttgtataattatttcattatatattacaatgtaataatactagaaatgaagtgcacaataaatgtaatgcagttgaatcatcccaaaaccaccactgccccctccaccaatctggaaaaattgtcttccccaaaaccagtccctggtgccaaaaaggttgaggaccactgcattctcccccttacaatagcagtctttctaatgtgcttgatgtttatccttttttcggtgttttatgtatatgtatcttctaattcacaaaaatggcattggatcataggacttatttagtttcctaatttttctcatctgttattatatttttgaagtctatttatgtggccgtgtgcttcttttgtttcttgctaccaactgctacatggtattccattgtttgcatctaccactttttatatatccattcttccaggcatgtaaactcagattacctctaatatcctgctgcttcaaatagcatcatcatgaatataaaggatactgttgtaatataattattatatggtattttgttggatctgcctactaggttttcttttaaaaaggagcacaaataagttgttcattttgtttaaaaaatagcatttttttagttacttgttataggagttggatttagtcagattaggataaatgtgaaaataatatcaccatgtggaatgagtttacaaatattaatatatttgattttaataactagttttcagcaagaaaactaaagtatattgtgtgatgtagggaatgaatgtagtgagtattttaagtatgatttaacttctatatatctttcttatgaactgcgcataatagtaaccatttaaccaaaaaaagctacatatatatagttacagtaaaaacaacaagcctgacaaatgtaacatcaagcttgggagtactaggcaatggaataaaaaatataaaagagaacattaaaaggataggtgcaaatagtggaatggattttcttaaaagacaggtaaataaaaaagtagaaaacaactcaccctaacttcctgaactgcaaagtacagtatagtagatagcttgtaccaaccctaatgagcaatcgtaggttaggaaggttgtgagatggaatatgagtggagatgttttgttttgtacatggcaggatattaggattttctttattaaaattgtagtatgtgttaaaatactttttccaaaattgtttgctaaatgtcttaacagcacacaagaaaagcaaaccataagaaatatagtatggaaatatgatatcaccagcgaaccagaggttggataatacttaatgtttggggccagttagtagtgttaaagggtcaggaatttttgtccattgtgccctcccagtgcctcaatatttcttccctatattacttggaacccctcttatttcttagattgctatagtataatatcaattattataattttatctcttccctgttcctattctattgtattctgtcctgtcctgtcctatcccgttccatctcatcctaacctattctgttgaagcctgcgctttacgttaatatatcctcagttatcaaaagtctagaagaaaagggatcagcagcttaatacccttctgaaagattccatcctaagccattaaatattttcaaggtaatttttagaagtttatcatgcattttccagtatgaacataatgcataccattagggaataatgaaaaatgcacaaaagtagaaatggaaagtttttaaatattatcaatatttgaagacaatattattcttcaaattgtatttttaagacttgccctaccttattttcttaagaaaaataatttttcttataactgttttatatttactaattgttttcctatttattatagaaaataggggaaaattaaaaaatgttatatatatcatcactcacacataaccaccattaacattttggtgcatgtcctcagtacaagttttttatttttttaagtagcagtgtgatcattcagaatcaacagttttgtttcctactgtaaaatgtagcataaatatcacattagatttatctctgttatcacaaactccttaagcatatgttgtttatttttaatatttcactgaataaataaaacacaaaacttaaacactcccatatttctgcaaatgcagttggcttctgttatttactgacttataaactgcaatgaaaaacatcattgtgtagaataccccctctgttttcatatgtcctttggacatgttattagattttcaaagtatattaacccatttaatttcttttattgtgactttgtacggcttatttatccattgaattcttggtacttaattattaaaatatattaaatgtcaaaagaaatacctgattctgtatattaaacactgatgatacaatagaaaaaaatagaaacttccctctacatcttagaagtaaccacctgaatcgctttcatttatgtttatgtctatatatcaatgactgtacatgtagatacacatatatacatgtgcatattattcagtaatctggatggatattactatttcatttctattatgtgaggctaattaattttatctttaatgactacatagtgcaccataatgccataatgtacaccataatttattttgcatttctcaattgttggacaactttaattccttttttttttttttttttttggtattatagatcatacggcagtgaatatccttgtagaaatttacttgtacaattagaaaagtgtttctgtatgtcattttactttttaaagaaattccaagatgtgatgtattggtcttactcaatattagtttttagagaaaaaaaagattaaatttgaattgcatttcctttgtctttgtaaaaatgtggcactgatgctgtaaacctttttttgtaacatttggaaactatgcagtgattgtcaattggagaaaagaggactacaaatacatcatcttatgtttgatttaatttaataggttggcgcaaaagtaattgtggtttttgccatggaaagtaaaaaccgcaattaattttgcaccaaactaaacgttattttcccaacaactgcactagtgtggtccactgcatgttggccaattgaactctgtgaagagtttgtcagaagaatctaatgctttaacatgtatatatcaggaaatttaggaaaatagtctgtaccaaattatccattcatttagtccctcttaactgagtacctactgtgttaggcattttggctctttctttgcatacagagttctttctctttgaattgatagcttattttggaggcagtgttttgttttttttccccaaggaaagactggaagagagtcgacttcattcaaaagttgaaagtcatagttaaaagacatgccgagttagctaagattgctagtattttgaggacagagatagaatttaaaaacaattttatagattcaattagtaaaagttaataagaaataggattgagttcaggaggagtaaaatagacaatatgtttaagtaggctatgcttaggagacatgagaaaaagatctttatattgaatatcctatattcactatatgagttttaatatatatcattatggatagtctgattaaaattccaataaatgaagaggtatcattgtcatgtgcgttttctctcatttttttttttgtttattcaggccaccagtatatctttttggcttctaattttcagaggaatgttgaaaaattaaaaatggtttaaagataaagaggaatgaggcaacattttggaatgattgtttttgatgaggagtagatgagaggtaactaaacgctcagtaattgtgatcggatgtgctgaacccatgatgtaggagacacaaggcctgtttcagttatctagtcaaccatgctctctgcaaaacactttcaacttctccatgccttctcctgtgcacagataatttctgtagagggaggaaaatgtaagagtgacataaaatcaaatgctctgtaagttttgaaaccttgttgagacttagaaagatgtctagaataagggatgggtataaatattgataggaatttaatagatgaaccaaaaaatatttccacttcaataatgtttttcagccaaagaggtcaaacctttttcacttgatacatttctataaggaaaagtgaaggcagtgtttactgttgttcaaattcttcaattctaggttctggagacaagtggccttggtagaggtcacaggtattaattgtgattaaaatttcataatcatttacacctggtgaactgttcactagacaatattgtctttagaaacccctggctgtgttcatatgcaactctgaatgccatttatgttgaagtttaactttgccagacaggcacagagtctagaagtgaatgttttctgccctctgtgcttttggcactggaaagacaaggtagacaaaattgggacaaaaatatgttataatactgctttcttctctctctgtaatagctatgtgtccttctgacttttaatagcttttctagggaaaaaccacattcccactgaaaatggaagaatgtcatttttagaaagcgtagataaaaaaatgatgacataaaacaaatagaaaagatttgagttaagcataaggaaatctgaatataaagtcattatgaactgtatatttttggtagcccctttagttttatgaaaaaaaaattacaccttttttttctttagaattgatagcttcttttggagacagtattaaggaaaaaaaagcagattatagatgagaagataggtcaacttgagtcaaaaattacatcatagttaaaagtctccagggaagctagttaacagaaatgagctgggatcatttggaatgaattatggtttattatggcattaaggtacatacatgagcttttggttataccccaagaacactgaattggtagtttattttcagaattttttttaaaagaaatgattgcttcaattattgttcatcattttctggttactcatgacatgttcttcatcattgttttcatatgaaaccttatcaaaataaccttatcaaaacagttaggtaataaaggccaggtgcagtagctcatgcctgtaaacccagaacttagggaggccaaggtgggaagatcacttgaggccagaagttcaaggccagcctcaccaactggtgaaaccctgtttctgctaaaaacacaagaaattagcagggtgtggtgctatgcacctgtaatccaagttactcagtaggctgaggcagaagaatagcttgaacccaggaggcggaggttgcagtgagctgagattgcaccattgcactccagtctgggtgacagagagagactgtctcaaaaacccaaacaaacaaacaaacaaacaaacaaaaacaatcaaaaaagttaggtaatcagctttttaatcagtccttcactgaaatgtcattttttattcttaagtgcagtcttgttcccatggaatgcctactatattcaaaatttttattcccattataatttattaatgatatgaacctagtgatattaattaggactacagttttgacttataggcataggaaaaataaattttttccaattttctgccatagacctttttgattactatatagaccataaaaatatgcttaccatagctttgaaaaattgtacagcttactttatgtggtttctctttttgttcatgtatctgtctcgtgactattttttgttgactttcgttgctcagaacatattttccccaaagagtacttattagaaacaattttatttattaataaccatgcatttttgaggtcctcaaaggtaagaggcagtttgggcttttccacttgcctgtgcagccccttgctagctttatatgggagacaaggagataaatacgtaaaccattataatagaaagaattaagtgctctaggagagatatggtgaaaggcaaaaaggaaacacggagaaagatgctccagatttgtctaaatatatgtaaaagggaaatttggagagttataagtgagggtggagatagggatatgggccctagcaagcccttacagagaaagtgacactcggacactttcttcactttctttgtgactgaaagattaataaagagtccatctggtagttatcctgggggttggaacaggtacaatgccaatacaaatagaagggatagcagcagtctgagctgtggatctgtagtgtcaactgagataggtagtaacaacttgggttagctaatcttcataatgcatctgggagctaaactgaggcatataatataaaagtatatgtagccaagtagcctaatggtatcatcagttaggcctgtttactgacttggaatataagttgggaccaaaaaaaaggaggttggactagatcatctacgcagtctcatagaaaagctatagtggctttgaaacttttctttaattgggtgctgttccagaggcaatcccagcctctgaagtggtggaatagagagagagtggagggtggaggcagagctgctgagcctgagcaagaggatggaaagtgtatgtcctgagttctgattccagatcttaactggatttcctgggtaatcacttttggtattctctttttctaaaataagggcattgaaggatcatctcttagcctcattcattcattcattcattcatccaccatatatttatagaacacatagttgcctagaactttctttgaattctttagatcatatgagtgaaataaagctcagtttatacaactacaatgagaatgtcactttccaaagctgtggctggaaaggcagcctggagatttgtaggaagccatgccataagttcatttaaattctgaaactagtttaaatgtgtggatgacaagggacactaggatgatgataataacttctgttgacttcttactatatgtcaagcactgcattaaatactatatatgctcacttaatatatacaataaccctttggggtaggtatcttattattattattattattattattttcattttgcagatgaggaaaatgagactgagataaagtcacatagttacctaagaccacacagctagttaaggggcttcatattcaggtttatgtgacttcaaattgtcctctaaatcaatgagtgctgatcctggctcagaactccacccgagacctaaggaataacaacttcagaagtttggtagtagaaagtggtttattttaaaatagcccatcaggtaataactatgtacagtccaatatgagaagcctttgtcaagatttacataaaatgagaggaaaatttgttgattgggtaacagtataagcaactgaaagagtaagaaagtgtaaaaatacggaaagagcattaggcaaggtgtccgaatttgcaactctgttctggggagtgatgcattgcaagggaagtgacacagaccatgaagaggagacttgggttcccattcttgcagctttatgaactagcagtgtaaacagggcaaaaagaaggttgaactggatggtttgtaaggcgccatgaaagaactacagattttttattctaaagcactaaagaattaggctttgtatgggcatcatttggtttgattaaaattttccttgggatagaagagtcaataaaattgatcacaatgagcacaaatttacatatttttagacaaacaccaatgccaaatcagaattttaaaatattttatcactttaagttttcgttatttttaattttgttttcctaattgttgactcaccaagaagcacccagaaaaatgaccaattattcaaactaacctctctggctttttcaactccctttgaacaatagtttagtgtacatatttacatgtagaatatcatcttatgttcccttaatttgttgagaaaatttccagttgagaacaaaatgttcatttgaaagttaatttgccaaaacaggtagtttgtaagtcctctctagagtcagctatttcataggatttggtacattttaatagctttgccaaaaatttggatgaagatgtgaaaaacataaatgtaaagctttcaggccttgtgtggtggctcactcctgtaatactagcactttgggaggctgaggctggaggatcacttgaggccaggagtttaagatcagcctaggcaaaatagacaaaaataaaagtaattagacaggtgtggtagcatgcacctgtagtcccagctactctagaggctgaggtgggagaatcagctaagcccaggagctccaggctgcagtgagctgtgattacaccattggactccagcctgagtgacagaatgagactgtctctaaaaataaacaaataaatgaaaatcaaaatttctagctgaggcaaagatgagagggaaaaatataagaatacagaattcacaaccaatataatagaataggttaattcttgcatttatgtaccttctctcacccgctcccatttttttcttttgagtataggataaagggatcattgtttaataggaaattcatgtgaagaaaacctatatgttggaaactcaagatgagcctttatgtgacataatttccataaaagataacacaatcttaaaattagcagatagcatccgtagtaacagagacgatagtcttcagcactgctctgggcaatgaccttttgtcaagaatgtactgaatattggtgcacaaagatgatggagtcttaaaattatatcaacaattgtagaagcaactaattgtatttagcatggagaaagcaagattgatttaggaaattataccacttttatcttcagtttttgaatgtctgtcttaggaaaattattatgcagagtagctctgtgggtggaagttacagagacacagatttcatcctagtgtaagaaaacaaaatagaacagtggaacagcctgttatgtggaagaattcaaacagagtgtaggttacctttggttggggactgtcagagaaggggtttagacagtgggtgggaggtacagtatgagctaggccctttcagatttccagttttagaattatatgttttagtatttagcaaaataaatttactgataagtaaaatatttagtcacaacagaatccctcctatatgtaacacacataattaacttgaaatgtagtccttgtcactaacaaaattttactgatgcgatgattaactatacaaagtaatgtaattgccaaaattacttccttaacatctgttgtccacacttcattgagaataatcatcgccaaatactaatctcttcatgccacttcctggcttaaaacacaatcattctgtgctatggactgaatatttgtgtccccccaaaattcatatgttgaaatcctcacccttaaggcaatagtgttgggaagtggagcctttgggtgacttggtgattaggtgatgaaggtaaagccctcatgactggcattagtgcctttatgaaagaggcttcagagcactagttagtgaccatgtgaggatgctagcagaaggcactgtctatgaggaagtgggccctaaccagacactgaatctgccttgaccttgaacttgtagactccggaatggagagaaataaatgtttgttgtttataagccacacagtttatggtattttcttaaagcatccagagcagactgagagagatgctctgcactaataaaataaaataaaaagataaagacaaattttttttttttttttttttttttttttgtgacgagtttggctctgtcgcccaggctggagtgcaatggtgcgatctggcctcactgcaagctccacctcccgggttcacaccattctcctgcctcagcctccctagtagctgggactacaggcgcccgccactaggcccagctaatttttttgtatttttttagtagagatggggtttcactgtgttagccagcatggtctcgatctcctgatctcgtgatccgcctgccttggcctcccaaagtgctgggattacaggtgtgagccaccgtgcccggccgataaagacattcttaatgtaacctacaaagtccagcgagctccccccaattagcttctccagctttatgttccattacccttcatttccaaatgaaacatattggcctactatttatttattacatatacaccatgttttcatttgctacacatcatttctcatgctgcttttttccctgcatggatgtccctcttatttctagctgacttctagttttattcttcagatctcagtttcctttatacttttcattaatcaaggaaggcttgctgatcttcccatttagatctgatttcctgttacatgtattcatactctgtttctcatttatcactgttacaaattgtatttgcttatcaagttatttgattaatgtatttcctctactaaaacataagcagcctaagggaaagggaattttatgtttttagttcactattgaactcctagtgtcccaaaatatgtgccgattacaataaatatgtgttcgattaataatataagtggaacagatagcacttactttaaaagtacagaccaatgtttagtgaaaggatgtgatccagtgaccctatggcaataagttaactctatatactgcctgcattttttagactgtgtttacttttcacaaaagccctaacagctaggattattatgttatatttgttttataggtaaggaaattgtatccctctcaattaactatttcaaaattaatatttattaagtaggatatttaagataagaaactgtttgagattttaagaaaataaccatgtgcttggtatacctagatattatgttcttcaataacttactttaaatggcatttaaaatatttttctataggattgtcttggttcaggctggtataactaaatatcatagactaggcagcttaaacaacaaacatttttctgttgcttgggaagtgcaagactacagtgtcaatagatttagggtttgatgagggccctcttccttgttgacagatggctgcctttttgctgtatcctaacctggtgagagaaggagaggaggtattctggtgtcctcctcttcttataaaggcattaatccttttgctgtgcagaagttctttagtttaatcagatcccatcagagtgaacaggcaacctacagaatgggagaaaatttttgcagtctatccatctgacaaagggctaatatccagaatctacaaagaacttaaacaaatttacaagaaaaaaaaaaccccatcataaagtgagcaaaggatatgaacagacacttcttaaaagaagacatttatgcagccaacagacacatgaaaaaatgctcatcattgctggtcatcacagaaatgcaaatcaaaaccacaatgagataccatctcacaccagttagaatgtcaatcattaaaaagtcaggaaacaacagatgctggagaagatgtggagaaatagaatgcttttagactgttggtgagagtgtaaattagttcaaccattgtggaagacagtgtggcaattcctcaaggatctagaatagaaataccatttgacccagcaatcacattactaggcatatacccaaagggttataaatcattctataaagacacatgcacatgtatgtttattgcagcagtgttaacaatagcaaagacttggaatcaacccaaatgcccatcaatgatagactgggtaaagaaaatatggcacaaatacagcatggaatactatgcagccataaaaaagggtgagttcatgtcctttgcagggacatggatgacgctggaaaccatcattcacagcaaactaacacaacagcagaaaaccaaacactgcatgttatcactcatagatgggagttgaacaatgagaacacatggacataggagggcacacaaactggggcttgttgggtggtggggggctaggggagggatagcattaggagaaatacctaatgtagttgatgggttcatgggtgcagcaaaccaccatggtacgtgtatacctatgtaaaaaacctacacgttctgcacatgtagcccagaacttaaagtataacaaaaatgttttttaaaaataaaggcactaatcctatcatggggactccattctcatgacttcatctacatctaattttgtatcaaaggccttaactccaaataccatcacattggtgactagggcttcaacaaatgaattttggagagaaacggcatttagttcataacaaaaactaatctttgttttgtttatacttcctcattttaaatctatttgtagttttaaaaattacatatggaatcctcagttgattatgtatcttagataccttgacaggtgggacttgtaacttgaaaataacacttccatctagtgacaactaacctgattaaattaaaaaactctggagtagctgggaagggtaaaacaaatcattcacatagaatggactggacacataacttagagcagtcattttttaaaaataaacacctgaagtaactgatgcttgtgaagcttatggattaataatgatcaaacaaaacaatctgtttagctaatagaatattgctcatgtagtaactagataaaatgttttcttataatcttgccacttaaaaatgggtccgtctccattttcctcactccactgcttctgaatgagaaccttttgtactctgaaaacctagtaaaaagttttcttcttagtttaaaaaactaactatattcaggaacaaacatgtatgagaaagtgggttcttggtaaaatttccagttgggttttgcagaatcgtaaagaagttgatgttaaaataagctctatttatcccaaggggacacttaaatccactttgaattaaattactgtgggatttaatataaacacaataataaaacacttccagacatgcaatacatagttagacaatgaagatatataaaaattttctttaaagcattgaatctcaaaggaaatatggatgatttatttgtatctcttaattcctgaatttatgttatagattttaggtgatatattttaaattaactattcagctacattaaaactacaaatacaattgtcatatacaatcctttgagctaaaatgttcttatcatatgcaaatgccagatcaaaagagataattattctatttctctggaagcctatataaacaagaaaaacctatcactctcaaatgataattatttcactgattgagatagaaaatcatgtttaatcttttttagatagtccagaaggtattatatctatttgtccacttactggtatatccattaaactgtatccctaaggtgttccaacttaagatgtagaaataacctaactggacatattaattgctttttatatcagtcaatgaaaattactgctttcctgaaaacactatttattatcctgtctccctttcaggaactatatttcatatgctgacaataaacacaaagttgacattttgccaacagttaagttggaaatatcaagcacgtgaacaaattcaagataagaaaagcatctgtcttacacatattcttagtcagtgtcattaaaatagagttgttttgtggcctacttcaggaaaaatatacagatatgaccccatctcttgttatatttgtatacactattcatataaaaagtgtggattgtaccagacaacaacagatgacaagttatgattcaaacttgttgccaaaaaatattgcatcaataccaaagggaactgattctttgaaaattatgttgtgtcatgtgattgtaattagcttgtatgaagcacagctgatctaggatgtagaattcagtggtaatccagagaatagtgttcctattattattaataggaattattgctatatgacaggcattcaattaaacgatttacatacataattatttttgtttttattaaatggacagaatctgattactaatattcctcagttcctatcccaatttgttaatttaaacatgatcctcctttatttattttatacaaattacttatgatataatgaatatccatacatacacctagaattagaacattgtgagtaatttacatctatgtatttggttatcttatcatatatctatctttttcttctctcttcctgcaaaagattaccactattgtgaattttgagtttctcctttctttaacattgaaaaaaatagttttattttgcctgtatatttaatatattacttgttttgattcatttctaactttttatgtcttgagaaatccatacctacgctaatgtccaaaagattaatatattatgttctattaaaagttttgaattttgattttgatatttaagttcttaactattcaggaactaatgttttggggtggtttgaaacaaggatgttacgtgattttgtttgcatatgataaccaatgtttttcttcatcgaatagactcttcttttcccattaatctgacatgccatctatatatgtataattgatacttatatagttgtttatgggtctttgttttgctccgttggtcagtttatctatctatacacaagaaacacattctgaattactgtaactttatagtaagttctattatgtgaaggccaaattatttctccttttcttttagtgttttactttgtttctgctgttttgcatttctgcatacatttgaaagtcggcttgtcaagttttatgaagaaaacctattggagtttgactggagttacatcgagtttgtaaatcaattttgagagattgacatctttacaatattaaatctccctacatgaaacatggtgtattaattatctacttagcccttctcttacgttcctttagttccttgtttttacatgtgtcttgtggtttgtttttttgttaagttttttactagacaatttacattttttattacttttataaaataaaatctttaaaatatgtttttaaaaatatctgtcgccattttatagtaatgcagttagctagctttctttcatgcttcttaccctcccttgcttcctttcttccttttttttttcttctttcttcccaaaagtagcagaataaaacaaaagtttactaaggattgcatttattgaatagaaaacattttagagtcctgttacaagtagcttgtggctgaatttcctcacatagtggtattatgttctctcttggcagatgggtaacgcaaacattagaaaattcaaataatttttccataacttgaaagaggtaatagtgggattttactggtcaattttactttaagacctgtgacttataagatgttctgtaatgagattttgttcccctcattccactttcttctgctgcataatgttaatattggatttaaatattttcttctcttatttatttatttatttattttttgagatggagtcttgctcttttgcccaggtcggagtgcagtggcgcgatctcggctcactgcaagctctgccttccgggttcatgccattgtcttgcctcagcctcccgagtagctgggactacgtgtgcccatcaccacacccggtcaatttttttgtatttttagtagagacggagtttcactgtcttagccaggatggtctcgatctcctgacctcatgatccgccagccttagcctcccaaagtgctgggattacaggcgtaacccaccgcacctggccttatttatttattttttaattaatttatttttttgtttcatattcttttttttaattatactttaagttttagggtacatgtacacaacgtgcaggtttgttacatatgtgtacatgtgccatgttggtgtgctgcacccattaactcgtcatttaacattaggtatatctcctaatgctatccctcccggctccccccaccccacaacaggccccggattgtgatgttccccttcctgtgtccatgtgttctcattgttcaattcccacctatgagtgagaacatgcggtgtttggttttttgtccttgcaacagtttgctgagaatgatgatttccaatttcacccatgtccctacaaaggacatgaactcatcatcttttatggctgcatagtattccgtggtgtatatgtgccacattttcttaatccagtctatcattgttggacatttgggttggttccaagtctttgctattgtggatagtggcacaataaacatacgtgtgcatgtgtctttacagcagcatgattcataatcctctgggtatatacccagtaatgggattgctgggtcaaatggtatttctagttctagatccctgaggaatcaccacactgacttccacaatggttgaactagtttacagtcccaccaacagtgtaaaagtgttcctgtttctccacatcctctccagcacctgttgtttcctgactttttaatgatcaccattctaactggtgtgagatggtatctcattgtggttttgatttgcatttctctgatggccagtgatgatgaacattttttcatgtgtcttttggctgcataaatgtcttcttttgagaagtgtctgttcatatccttcgcccactttttgatggggttgtttttttcttgtaaatttgtttgagttcatcgtagattctggatattagccctttgtcagataggtagaatgcaaaaattttctcccattccgtaggttgcctgttcactctgatggtagtttcttttgctgtgcagaagctctttagtttaattagatcccatttgtcaattgtggcttttgttgccattgcttttggtgttttagacatgaagtccttgctcatgtgtatgtcctgaatggtattgcctaggttttcttctagggtttttttgattttaggtctgacatttaagtctttaatccatcttgaattaatttttgtataaggtgtaaggaagggatccagtttcagctttctacatatggctagctagttttcccaacaccatttattaaataggcaatcctttccccatttcttgtttttgtcaggtttgtcaaagatcagatggttgtagatgtgtggtattatttctgagggctctgttctgttccattggtctatatctctgttttggtagcagtaccgtgctgttttggttactgtagccttgtagtatagtttgaagtcaagtagtgtgatgcctccagctttgttcttttggcttaggattgacttggaattgtgggctcttttttggttccatatgaactttaaagtagtttttttccaattctgtgaagaaagtcattggtaacttgatggggatggcagtgaatctgtaaattaccttgggcagtatggccattttcacgatattgattcttcctacccatgagcatggaatgttcttccatttgtttgtatcctcttttatttcattgagcagtggtttgtagttctccttgaagaggtccttcacatcccttgtaagttggattcctaggtattttattctctttgaagcaattgtgaatgggagttcactcatgatttggctctctgtttgtcgttattggtgtataagaatgcttgtcatttttacacattgattttgtatcctgagttttttttaaagttttattttaggatcagtggtacatgtgcaggtttactatagggataaattgtgtttcatggggatttagtgtacagattatttttttcacccaagtaataagcatagtaccacatagtttgttgaatgtcacgctcctcccaccctctaccctcaagtagacccctgtgtctgttgttccattctttacgttcctgtttactcagtgtttagctctcaatttttaagtgagaacatgttctcggtatttggttttctgttttaggataatcatctccaggccattcatatttcttgcaaaggacatgatcttgtttctttttatggctgtgcagtattccatggtatatgtatacaccatattttctttttccagtctgtcattaatgagcatttaggttgattccatgtctttgctcttgtgaatagtgctgtgatgaatgtatgtgtgcatgtgtctttatggtagaatgatttatatccctttgggtatatattcaatcatgggattgctggatcaaatgaaagtttggttttaatttcgttgagaaattgcaaaactattttccacaggggctgatctaattcacattcccatgaacagcatgtaagtgttcccttttctctgcaaccttcccggaatctgttattttttaactttttaattatagccattctgactggtgtgagatggtatttcattgtggttttgatttgcatttctctaataattagtgatgttgaatattgttttcatatgcttgttggccagctgtatgtcttctttggaaaagtgtcttttgatgttcttaccccactttttaatgagattgtttgttttttgcttgttaatttgtttaagtttctcacagaatctgtgtactaggtctttgtcatatgcatggttttcaaatattttcatccattctgtaggttgtctgttgtagtttcttttgttgtacagaagctacttagtttaattagatcttatttgtccatttttggttttgttttaattgcttttgttgtcttcatcatgaaatctttgccaaggtctatgtcctgaatggtatttttaccaggttatcttccaggctttttgtagttttaggttttacattaagtctttcattcatcttgaattaatttttatattgctttatatttaagtctttcattcatcttgagttgatttttatattgctttaaggaaggggtccagattaaatcttttgcaaatggctagccagttttcctagcaccatttatattgttattgtagtcttgtagtataattcgaagtcaggtaatgtgaggcctccagctttgttctttttgcttggtatagctttggctatttgggttcttttttggttccatatgaatttaaaatagttttttttctaattctgtgatgactggcattggtagtttgataggaatggtattgaatctgtaaattgctttggccagtatggccattttaactataatgattcttcccatttatgaacatggaatttttttttcatttgtttgtgttatttctgatttctttcagcagtgttttgtaattctcttacagaggtgttttatttacctggttatttgtatttctaggtattttattattgttgtggatattgtgaatgggattatgatctggatttggctctcagcttgaacactgttggtgggctgatgttcctttagtctttgaagttactgttctttggatggagttttttacaattttattttctttgatgcctttggaagtttggttgtggtttgaggtaggttcagtagactgactttatttctggaaggttttagggggccaaggatcagcttagcactcctggactgcctgttaactctggatggctgtactaggccctcagctgcagtctctggccctttgaggttaggaatctgattcactcggggggctgaggtgtcccagtctactggccacaactctacaaagctggtgctggcagggtttactcctgttggcttgggtggcacactggtgggagtgagcctgaagtggtcctgtgtatgctcatgcctatggcagtggcagtgtggctggtgcagggcggtggcagaggcagagttgccagcgtccatgtacacatttgtgctgttggtggaagggtaacagggcactcctgcatcagcaagggtttggacagttagctctgtttgcatcatctgtggtgacacagtgggatgcattcacacacacgtactggctgggtaagggaggtgaggtctgcccacatggggagagggagactgtagtgggtcaaggctgcaggttggctagtgtgcatcgtcaggggctggtctactggagctcttcaacaaacagacacagtcttccagtgaaggagctatgatgataacccctgggaagcaacttggttggccatcagaggctgtgcttcaagcaggtacatatagccaggctgtacccaggagaggccagcagacagaggatgtgcaatttggactggtcccatcccatttgcaacaccaccatgttctgtccaggtccaacagtctctcaaaggctgacgtcacttagaaggccatggagagtctttggggatgggcaccctagccatactccactgcagctgttcctgtcccaaaccctgtgggctctgcacaggctggaatcctgtttcttccatctctctgccaactctctgccagctcaagtgtccgtgggagtcatgggctgtcttgttgccaggatttttggggattcctggtgaggacagagcactcctcacctgtttagctcattccgcaggagttgctggggtccaggagcgagccccagtgctcagcagccccctacagggctcccagcttcctcctcaagttcagcccactgtctgtgtcctaactgcatccactctcaatgctttcctgctgaagatctgctcagagtttgctagtcttccccatgtccctgtctctcagtgtgagatgttcctcctggctgtatctagtcggccatcttgggtcttgtcctactttcttttcagactaaatctttagtcttttcaaaatctgttaatagaaatatttgtgcatttatatttgtcaaaatatatgtattctaaatgtacttattatttatttctattcatccattcatttattcacacaagacttctttttgaagcttgcttagatttaccttcttaaacaattttaatttttaattattatagtaattgtatatatgtataaaatacacatgatattttgatacaaacatgcaatatgtcataagagtagctgggatatctatcacctcaaccatttatcatttctttatgttggaaaaattgtaattccactcttttagttattttggaatatacagtaaattattgttaactatagttgccttattgtgctatcaaacaatagatattattccttttaatgggtactgtgttcatgtacctgttaaccattgcctcttcatctccccacttcccactactcttctcagcctattctctgtctccatgagttcaatttcttttttttagctcccatatgtgtattcactcaagatttattgattaccaaatttgatggatagagttgcctacagattgtgggagtaagaataatgtaactaggaattttcttgaagtgcctgctttttgtttcatatatatatatatatatatatatatgacttcatcttcttgataacagtggggagttttcagtgaccacttcataatattttccatgatactgcaagctgtgcaatttaaagttattggtggacatacaagctttgtgaataaaataaccacaaagattgtaaatatttgaacaaacttgagagttgtaaccaaataaaatgcttatcagagcatggtacctgtgtttaaaaattcagctcaattcaacaaagatttactgaaaactaccactgtgttagggctgaggatacatagctgtaaaaaatggatcctgcttttgaaaaacttactacctgggtgcaggaaaagagtagaaaggaggagtaagccagatcctagagttgagaggaagttataaggagaaatgaggtacctttggggcttctgcttctccatggaatgtccttgtgataatatataagaatcaaggtaatgcatagaaagtcagaaaagtttgaggtattatgacacaaacacattaattcatataccaactaaagaggaaatggtgctggctaggactataggggtaactcatgagtaagtaataaactaaagtagtcatgcttgatggaagatgaaacgcaagacctgtgtttaactaacatactttactggcaactaagcataatgtatatggcctataggagctattggagtaggcttttctcatgtctctcaatttaatatttatccttccgtatccttcagtacattttttgccttagttttaaccctgagatgaaaagagtcatagattccagggtacagaattccttttcaactagtttgacttttgacaaggtaaacagcttctaagatctttatacaagtcatctgtaaattgagtataatagttcttactttacaaggtttttgaaaatattttcagtgattcattaaaaacgcttagcctggcgactgttctgtattggatgataaagagatggtaaacctgttagttgtaccttactatgtcagctttctgtagatgagatctttgttgttcctgctttgctttttatttatgcccagactatttacttttgtatttttaatataaaaatgctatttttaaagctacatttggccagtaagtttggaaatatgcaattacactttcttattataatttaatggttgtcattgtttcataacttgtaaacagtacagttggctaaatagtcttaggtagtggtgttcaacccaggtggcatattagaatcatctggaaagctttcaaaaatgccaatgttcagacactacccaaagtcattgaattcaggatttcttgtggacctaattattattattttgtaacagctcttcatctccaacatggcaataataacatctactcagcttgtcagagtagatctgatgattacattaaaaatatattcaaaagtgattgataaacagataattaaaataaaaatgtagggtaatattaaaacattttagaaatatttaccctggtcttgaggggtttaacatttacttagagaaaaaggttaaaacataaaaaattcaaggtaacatgtcacacactaaatggaagtaacagaataattatgctaggaatcccatcctaatcacactgtgtaggcaatccttaatgtatatgaggctgtgaccttgtctagtacttctcaaatatttatacctgggctttctttaatgataaaagaacaagaacaataacctttttggggctggagagggttactaggagggaagtcttatctagggtggttgtctaaaaccacttacctcaaatgtttgttcattcatcaagtcattcaacaaaatgtttattacctaatatgtgccttctggacattttctttttaaaggcaatttagcagcatgataaagtgggggttaatagtataaatgctggagccagaatatctgggtttgaattctggctccacaactttctgattatcttatgttgggtaaattcttaacttcactgtgactcaatattctttattttttaagaaggaagacaatatcgttaattacttcctagggttgcagaaagaggtttaatgtattaataagtgtaaattgatccaaactatgtgtggctaatagtaagagataggtgtgcttttgctaacatctctgcatttttattccgttatgttcttcatttgttttagtatgaacataatgttttcagtgtgaacatatgaagataatgctttaagttagctatcaccaaatgaaaatggttctcaaaagaatggatatatcctcctcctaagacagagtcaaatatatgaatctcagtttttcaaggcactatcttatttaagattggtcattttcaacaacatggattatctagaggatgttatgctaagtgaaataagccaggcacagaaagacaaatactgtatgatctcacttacattttgaatctaaaagagttgaaatcatagaagtagagagtagaatgctgctggttaccagagcatggggatgggagtggacagagtgtacaaagtttcggttagaagaaataggcctagtaataggcctggaaataggcctgtttttgcacaacagggtgactatagttaataatagtgtgtattgtatttttcaaaatagctaagagtgtattttaattttaattttttattttttgagacagagtctcgccctttcacccaggctgtactccagtggcatgaacatgactcactgcagcctcaagctcctgggttcaagcaattctcctgtgccagtcttcagagtaactggaactgcgggtgcattacaccatgcctgactaaacgtggattttaaatattctcaccacatggcatgcatctgtagtcctagctactcagaaggctgaggcaggaggatagcttgaacctaggaggaaggggctgcagtgagccctgatggtaccactgcactcagcctgggagaaaaagtgagaccctgcctcaaaaaaattaaaaaataaatataaataaatatatttaccacaaagaaatgataagtgttttgggggatggatatgtaaaatagcttgatttggtcatttcatgatgcatacatgtattaaaacatcatattgtacccatacatatatacaattattatttgtcaattaaaaataaaataaaaattttaaaaaaacattagaaaggaggttagagacataatcagggaagtacagaaagcaatgaatgcttgtataccagtgggttctctcctagtttccgatcagggaagaagtctagaagagtcgtgcttactatgtgaccagaaagatgagtagagttagtgataagcagagcttgcagaaaagctgtggtgtgtaaatgggtgggttgtgtggagactgagagtgttccagagagagagaacacatgagaaaaatgtcatttaaaactgtgaccttatcagtgaataaagggtccaacaccacataaatgtggaggtgcagtatatacagaaactcttaaggctcttaacagccagaacaatggggtaggggcagaacaagaaatggagtttctttggaaacagtgttttcaggtgattgtaacattagcattaatgagaggagtactaagttttgtggcagtgcagaacagaaagaagtcgttcaaagggggttttagtgagaggaaaagggaagactattcaaggcttttgaaggagctggtatttggcatgattcttaaaagagcaatagggtgagacctctagcttctagagccaggacagggctttactactgtccttaactgtgtgctgaccttgccttatttgttcagctaggattgtgtctaagcagagcctcagcatctgttcttaacctcaactgcagccttatccttttacccatgtgccgaacactcttggcttacctccgaggatcacagaaggtaagaaaaaacagtcctactttcaaattccagcataaaaatcaagtgtaacagtcgcatgttagtttgtttacttttcatagtctgacttttgactggagtgatttcttgtaagatgatggtaaaagacatgtcacctgccaagatgatctgtgagttattctgcaataccagataagggcagaggataatagtaatattattaacagggatttccagcactatgcttagtgtttcacatacatgctggacaattcttacagggattctacaatcaggtattgttagtttcatttcacacacaagaaacctcaggcatagaggctttgagtaacttcgagactagggaatgacagagctaaggtcaatcctaatttgagttctttccattatgtcttgtctcattgagattctgtattttcacttagctaaatccaggtgagcaaactagagtcctttagattctgagcaatacatgaaatgattgctggtgttggcaacaacttatctctgcttaacacatatactcattttgaagtgtgtaataggcttgagaaacatgtctttttttattatactttaagttctagggtacatgtgcacaacatgcaggcttgttacatatgtatacatgtgccatgttggtgtgctgtacccattaactcgtcatttaacattaggtatatctcctaatgctatccctcccccctccccccaccccacaacaggccctggtgtgtgatgttccccatcctgtgtccaagtgttctcattgttcatttcccacctatgagtgaggacatgtggtgtttggttttctgtccttgtgatagtttgctaagaatgatggtttccagcttcatccatgtccctacaaaggacatgaactcatcctttttatggctgcatagtattccacatatatgtgccacattttcttaatccagtctatcattgttggacatttgggttggttccaagtctttactattgtgaatagtgccacaataaacatacgtgtgcagagaaatatgtcttgattaaatagtgatgtcagggggaggggggagggatggcattaggagatatacctaatgctaaatgacgagttaacgggtgcagcacaccagcatggcacatgtatacatatgtaactaacctgcacattgtgcacatgtaccctaaaacttaaagtataataataataataataaatagtgatgtcatgtattatatgcagtgttgtaaaatgaagtatgtaagaaaacaaaaacagtcattctgctaatcaacaaaaattcttttttgtctttgactaattttgtgtatatgtgtgactgtgtgtgtgcgtgttgattcttcttccctaagattcactaagcaaagcaccgctggatagatattgatattttaaaaggagttgttaacttgagatcactttgatgttctatgaatttaatgtgtgcagatttactctaggaaaacttctcaaccctttctacataattatatttagaaactctttccttttaatgcagtaatctgtgaaaataactctctctaggttgcctaccatttaaactgctaggttttgatccctgtggttggctattggtttggcttggagaaagagaagataagtggcagggaataaaaagttcccacctaagtctctcagtatttaatcattcttaaagatttgccccgagtgtgaaacagtgattcagaggtgcttgacattttattttgttataagatcaaacaggcatttcaaactatagatgagattgcttcattttaaaataatcttattttttgactgtaaaaggaaatcatatatattttaaaacttaaacattccagaaatatgcaaaatgatcagagaaagtttaccctaatcttattctgccagaacaaccactgatgacaatttgtggtaagtgcctgcagatacgttaacatctaatgccattagtgttgatcaatataagatcacagtgcagtttttttgtaactttttttttaacctaacaatgtgtcttgaacatctttctatatcaataatatggacttctcacatatattttttaatggtttaggtgtcccattaactagatagatcataattcatctcaccaatttttgattaataggcttccgccatattttaaaaattttgacataatgaacaatgctatactgaaaaacttttatcacatttgttgcattatttttaccatattaaatgatttttgtttaggttccaagcaggagaaccaggagattgttggataaaagcagaacattccatattacctgtggtgttactatctgtattttctcaggtgagaaagccacaagatattaaataatttgttagaattacacatttaaatgtaaacattccagacatacacagaatgatcagagaaagttttccctaatcttattcttccagaacaaccactgatgacaatttggggtaattgcctgcagatatattaacatataatgtcattaatggtgaacaatgtaagattgtcgtgtggtttgtgttttaaaccacacgtaaaattacacatggaaaatgtgtgattttattgttctgtacattatctgctgtcagcaacttaggattttcttattaaatagcttagtagttcttttccatgtttttgaaaagggttgtctacagggaattacagaaaatggatgtgtcttgtgatttttacattatgatatccaaaagttggcccccaagctgataatgactatttcctgaaagtaagtaatttcattccagtaagaaatactggaagaaacagactaaaagttttcaagctctgaaagtgatgatgtgatatgagtttaaatgcatgaacattttattttttatttttttgaaacagggcctggcactgttgcccaggctggagtacagcggtacaatcttggctaactgcaacctctacttcccaggcttaagccatcctcccacctcagcctcccaagtagctgggactacaggcatgtgccaccatgcctggctagtttttgtatttttttgtagagacgggctttcaccatgttgcccaggctgatctcgaacttctgagctcaagcaatttgcttgcctcagcctcccaaagctctgtgattataggcgggtgccactgtacctggccaaatgaatgaaaattacaatgtgaaatactcattagtagattaggattccatcccgaattatatgtgatcaatatttctttgatattaatatttggtagaaaaaccaatgtcaaaatttctgaagctttatcttgctcttttccaaattaagaaataaagcaatgatctttgtgctattataagcctttttaaaatacattttgatcctgagcttttagatgatacttttcaaatttttggaacagaaagtaagaaacatagtgatgaaggacatggattccgaggagtccatgcgtaggttctatcctcagttgcccttctgttttaatgtgtgatgttacctctctgatcctcaatttgctgttgttgttgttgttgtttttaactgtaaaatggattgacagcaggacttacctcatagatttaagactaaaatgagaaaatgaatagaaatttttaggatagaattagtaattgtaatttacagttgcaagggttaattattccagtggcatagcacctggtattttcacctggccattatttgatgacatagctgttttgatagcagggccattttgactaatgaatgttttgatacagctattgccaagaaattattttacttttaacttggtaaaaaattgccaagcattgttgaaatgggtaacttcattgttttatctctgaatgtcttccaattggtagtcccacctctgcaggtgttagatggggagaggctcagggataggattagcagttcagtgaggatgagataaggaccaagggtgtagtaagggttagagatagattagggagagggagagtgaaaggtcagaaatggaggaggatcaggaaaccagcatattcgtgactcaatttgttctaaactataatcatgtccaagtattctggttcaactggagagcaaccaagcaactgagctagcatgagcttgtgttccagagggtttgcattctgccagtcactagtcgtctgactttggctacattacccttctttaacttcagttttcttgtctgtaaaatagggatgactctatctaccacattgctttgttttgagaatcaaatgagaaaatctatgtaaagtgcttggttgagctgcttccttgctgcctaaaattagaagccctgaattcttttgacctaagaggtcctttaaaaaggtgaatatatcccttaattatgtattttctatagctgttacctacaaattttttttcagagaaattcagaaagaatagtaattcttctatagatgactttgcattttttagccatagagtatgtagttaatatataagcttttaatttaatatgaaaggattattttactatacatttgggtattgatgaagctatatgacacagagagttttgtgtaaatagtattttatacctgtgccatagttgtgtcacacttagaccccctttgttttactactttggaaacttgtccttgcttgttatttaactcatgttagcttcctgtccattttttttcctcttaaaaatttttaaagactatttttctgtagggcagatttatgttcacagcaaaattgagaggaagatatagagagtttttgtatatcatttgtcctcatgcatgtatagcctcccccattatcaacatcccctgccagagtggtacaattttttacaattgataaatttacattaattgacatatcattataacctaaagtccatgctttacatcagggttcacacttgatgctatacattctatgggtttgcacaaatgtgtaatgacctgtacccaccattactgtaccatgcagaatagttcattgccctaaaaatcctctgtgctctgcctatttatctttcctttcccactaacgccagaccaccactggttagtgtttacagtctccataattctgccttttctagaatgcaatatagttggaatcatgctatatgtagtcttttcagattggcttctttcacttagtaatatgaatttaagtttcctttgtgtcttttcatggcttgagagttcatctttttatagtggtaaataatattcccttatctggatgtaccacagttttttttttatctattcacctattgaaagacatgttggttgcttccagatttcgacaataatgaataaagctgctgtaaacattaatgtgcctgtttttgtgtgggcatacatttttagttcctttgggtaaatatccaagagtatgagtgcgagatcatgtggtaagagtatgtgtagtttttaagaaaccaccaaactcacttccaatatggctgtaccattttttgcatcccccacctgcaatgaatgacagtttctgttgctgtgcaatctcaccaatatttggtgttgtcagtattctggattttggtcattctaataggtacgtagtggtaacttgtcattttaatttgcatttctctgatgttatataatgtggatcatcttttcgtgcttgtttgccatctgtatatcttctttggtgaggtatctattgagatgtttggcacatttttttaattgggttgtttgttttcttgttattgaattttaagtgttctttgtatattttgataataatcctttatcgatatgtcttttgcaaatgctttttcccagtctgtggcttatcttctcatggtgttcaaaacgtcttttgcagagctgaaattttaattttaatgaaggccagcttattaattctttctttcatggatcatgtctctgacattgtatctaaaaagccaacaccaaacccaagctcatatagactttttcccgtgtatcctttgaggagttttatggttttgcattttacatttgggtctctgattcattttcagttaatttttgtgaagggtgtaaagtctatgactagatttatttatttaaatgtgaatgcttccttgtttcaggtccatttgtgacaaacgcattttcttctttgtattgcttttgctcttttgccaaagatcaattgactgtattaatgtgggcgtatttctgggctctctattctgttccattaatctatttgtcttttcttttgctaataccatacattcttgattactgtaacttcatagtaagtcctgactcttcccctacttctaatttgattacttgaaggaccttataaatcttttaaataactttcaggcattttagcattctaatcctctctcactttcattatttttgtgtgtgtgtgtgtgtgagtaccttagaactctaagccctctacattttacattatgggttgtgggaaattatagagttttctagattccaggctatgtcttcttttgaaccattgcactacacatattgtgaactataatggtttactaagcaatttcagatcacttatctcattaagccttttgtttctgtcaccatcattttacagagaagtaaattaaggcccctgaaaggcaaataatatggccaagatcacaaattttccagcgagttacctgttgtattttcaatacattaaaatgtggtgttaattcacaccttattttgcctacaagcaaagcttgagcaagggggaaggtgtgatgggcccgtgcacatctcaatttctccttccttacccaacctcctcaaaataatttttattaccctagctttgccaaaatgagttcatcttcacatctctagtaatttcctaacactgctattatttatgtgagctctaagtcagtcgagccctttgtttattgtgattattgttttcctgaattttgtcccatgaagtgattcccaacactttttctgttgggttaagaatattatgatttaaatctgtggattgtgaaaaatttctactagttgaaagtctttcagtggcctataatttaccttatggggtagggaagtatgcaagatatgtattaatagcagatttggaactatggaagaggtgaaagatgtggaatacctaaaatatcagggaggtgctcaagtaaataaatactcatatcattagatgcatatttatgtgtgtgtgtgtgtgtgtgtgtgtgtatgtgtgttagggggaggatgtgtgtgtgtatgtgtgtgtgtgtgtgtgtgtgtgtgtttctcttatccctgacttactagggttgtttcattacagcctttgaaaatttggtaaactgtctatagttcagttttttgtgtctttaaaacttcacctttcaatgtaatatttcattgtccacatagctgtcaaagtttggccctgtatttacttagggagaggaagaactgagtccttgacatagagcatatatgcaaatcccactaacttacccctggtgtaattctgtaggcgtgcatgtggctgcccatctggtgaatgccctcaacttctcagtgaattacagtgaagactttgttgaactgaatgcagcaagataccgagatgaggtgggtggtctctgtcttcccatttttctttcacttgtcatgagatgactaatgagggtctgtgatttttccctgaaaatttgtaccttactgctccttttgagtgcttttaaaatgcagttgtcaagttgagctttattccttttcagtagaaaatataagtaattactatttcatagtgtctcctgctgaaagtgagagttggtagaatgtctactttttatattgcaatgttcagatggttgccactcaggtctgcctctgactcccagcagcttttgtctaattcctatcattcagctgagagtgttgacagtgccgttacagggtaaaaatactttataattcacatactgggttttggggaaaagggaagaaaagtaggttgattttttgtgaatcctggacaaatcaatttatttgacttaaaaaatgttagtgagttttcatgattcattcatttaaaaacattcctcgaattaagtgatgttgaattcaattctgtagcaggcaatatctgacgtagagtgcttttctccatgtgaagccatccatgaaatgaaattatatttgcaaggtgcagcccagagcctgatgaacagcacatgctcagccagttaggtctctgttggttgatgctttcatacagtcctcaggctgcctttgcttcacaatgccaagactacatcaaaaacaaactgttctgtcccatttaaatcagcatcccccccccttattttcctgttctgcagactaagtttggtagtgacttattaacttttttccccaccttccccactcctttttcccctccacatatcaccagagttttctaggtttaatactgttgtgttcatgtgtttgacctccatctcaaaacaaaacagaggaaaaagtaacaacaaattcagaaacaaatcacaaaaccaaaatagccagcaacttttgatatagcccttgtctctattggtattttaaaaaataccaacatgatctaattagtcttggatgggaggcaggcattgataatttgtaaaaatttaccaggcttgtagagtgcatccagcactgagaaccactgaaaaattcccgctccttagcaggccagtgacagcgcttcacatgtaatttcagacccagcctccacttctgcccatctcacttccacctgcttccctttctcctgctgccctctgctcaaatcactagctacttgtttcctgcccctgttccaacatttcctttgtttctcttttccttcttttcttctcttttcagaattcatgtctttaataactttaatggttttctcattttaatggaataaacttttgcttaagttccaatatttttagtgatttcaaaattttcagttattaaatttattttctttgaaaagttatacatgctcaatataaaatattttaaaactctcaagtaaatgaagttaaaagtgaaagcttctcctccaaaacaagccacagtttattatgtttttttctgatattttgagtcgcattttatggtatatattccttggcgatttacttgtttgcataaatatacttttatagcttattgtatcaacatatcttaatctatctcattctctccatatgactatgccataatttatttttagtctttttcttattcagacatttagattgattctagggttttgttctgaaccacactccagtgaatgtatttctttgtcctcttctacacagatctgtagttgtagaattttggtttaaaaggttgtacatttttagttttgatggacagtgccaaattcctttttaaaaagtcttctcctgttttcacacttctaactaatattagaatgcctatttctacaactcatctctgtttttttttcccaatctaagggatgaaaatggcaactcaacgttttaagttagtatttcccctgcctttatttcttcttgtattccttctttcatgtctctctttatgcttttttctctctttttaataaatatgtatttagcatctaataggtacaaggccatgcattagatgtagatgaaaataagtgtatatatacttatgtatttaaatattatgtaaataaatatatggcatatctattatatatagattatattttatatattgatatatttatatattgattatatatatatatatatatatatagtcaacacatatgttattttgtgaagcacttttgaaaaagatggttttgtgccaatataccctattgttcttcttttatgcttttactctgcatgcaaggactcaccctccaccttgtgactgctgcacttccttgatagcccggctaaatctgcctcatcttgccactgtgaaaacatctctcactctcatgtttcattttctttctctagcaatattaattgttccatcttctgggttttcttaggtatttattcacatttctattcttaccactttgttcagcccatatgatatttttatgggttgtttatatattcagttttcttagatcaccctatagccatgtttctaatagttggaatagaagtcaattgaattaagccaggtgaggagctattcctaagcaagtggtccttattcaaagacccccagatgacactatatcaatcgtttccttcttagtacatagtctggcctgaccccagattcaatggaggcacacagaaagaaattcaaaagcttgtgaaatattaagcaccacggggataaaaaataaatccacaaatctagtggcgattggttttccagaaggtagaagggtgctgactataaccattagagcataagagatgtagtttaaaggaaatcatacaatattttagcaatattaatgtttcatatttctaagtagcagaaactggtttttatttgagtatcctcaccacttttcactatatttgaaacacagaaagctctcaattagtcttcttcgtactgagcttacaatgcgcaaatcccctacatattttattggtttttaattctgtcttcacatcttgtgatgcagtttcacggttttggtagacagagtatataataatagtttaacatcatggctaagatattgagtttcaaaatggtcaaagatgggcttaaaaccagtgccaccagcttgtaggtaaccattaagaataatttctgggccttttgagtcatccagtattttgcctcagatggatagatttctctgaattgggtttttacttgttgtaatctcctctagcattgtgaaaatgttatgaaacttaatcgagtctttctcacttccgttggatgaacagtattttacatgacaagtatgtggtttgtagatcctgcatactctttatagaattatatatcatcagtgctttagtttttaatcatttatttttttttctttttctcaggatcctagaaaacttctcttcacaactggtaagttgttattcttagccttttctttaggtttaggaacatctttaaaagtaggcattatcggactgggcgcagtggctcatgcctgtattcccagcactttgggaggctgaggcgggcggatcacctgaggtcaggaactcgaaaccagcctgatcaacatgatgaaaccccatctctactaaaaacacaaaaaattagccgggcatggtgggtggcaagtgcctgtaatcccagctacttaggaggctgaggcaggagaatcacttgaacccaggaggcagaaattgcactgagctgagatcgcgccactgcactccagcctgggcgtgacagagtaagactccgtctaaaaaataaaaataaaaataaataaaataaaactaagcattatcaaattacacaacaattagatatatgttacaaatataacatatggacaatttgcatgtaagaataaatatttggagttaaaggataaggttgcaatgagaacagagacaatgcaaacattggggtgtgaataaatggagagtaaaaataagcaaatacatttcactgtcgtatattcttccaatcaaaacaatgcaaccgcattcttattgagggcctgctttgtgcctgctgctgtggcaagtgctgtaggagataatgcatgtttaacaggctcctgccctcaatgtattggaaaggaacaccaagcactgtgggtatccatggagttcttataattcagtaatttagtgcaactttttttaatcttaaaatttacaacaaagaggagaaacagtcattaaaataagttatttctttgaaatgtgtctcctatttcatttgtaatttatttttccttttcaagcttattgtccatgaaatctcagtctagactattaatttgttaaagcacgtttgaacatctcaaaatttcccctgatgttaaacaatttttgctaaaagtcttctttttcccaaccttagatttataaagatgaaagaataaagatgcatttggggaatttttagcacatatttcagggacaaggatgattgcatagttgagatgctctatcataaattgttgggtgtaatacccaattaagtattggaattgcacatgggactgaggcacattaccctggcaaatgcattatttttcttttgaatcaattttatgatgaaacgtcacaataattctagtgctttccccatccatgtcacagctatatatttagatttataagatacattttacttttgtctatagatttataatacttgccacttgcaaagtatttcacagttttctctttaggaacacaatttagttttgctttcaactttgctcattgaaaacatgttttcatttaggcctgaagaattgggtgagaacaaaaagtacagaaaaagaaaactttacgtatcaaccaatgtattttttggtttacagtgaattcatttaagagagagaaacaaaagctttgtttaatattattttctaaaacataaagtttaattgaagccttggaacctttaaaatgctttgaaaagtttagtttacaaagacacaaagagatttgttatgtgactaagctatcacattaaggcactaatattattatactattagtagtattattattagtattgttactattagcactattatgattatactaatattactaatattatattaataatataatatataattatatattatatattattatatataaaataatatatattatattattatatatattttatattatatattatatatataatatataatatattatatattatatatataatatataatatattatataatatatataatatataagatattatataatatatataatatataatatattatacactatatattattatattattatattatattatattatatatagtattatatatagtatatatgatataataatataataatatatagtatattatatattatttatagtatatatagtatataatatatagtatatattatatagagtattatatatagtatataatatatactatatattatatatagtattatatatagtatataatatatagtatatattatattatatatagtatattattatatatagtgtgtaatatatagtatatatagtatataatatatatgctgtatattatatagtatatatagtatataatatatatgctgtatattatataatatacatagtatatattatattataattatatattatatattatttatattataattatatattatatattatatatattatataatatatagtatatatagtatataatgatatatactatatataagcaagtttaacatctcaaaatattttatatgtagtatatatattattatatattatatataataataatatattactatgttatactaatatactaataatactaatattattatactaataactaatacttcttataagcaggtaatctcactacctagcatgcaaccctatcatcctatgtcctttcccagaggtccccatgagtggtgttggacttagtagagaagacacttaatacaaatttcctgggtctaccttagtgtgtgtctgggaaagacttggcaaagtgttttactaaccttcccaggtactttgggagctgctgtcctgtcactactgaacatctcatcatactcttgagcataccgtctcgctactgcctgccttttgtattaggtatttattgtaagtaaccgagagataatttaaagtatgtgagaggatgtgcacatgttatgtataaatacttgagcattctcaaacttggtatctgtgaggggtcctggaaccaatcgcatggatattgaaggatgactgtaaaaatactgtgttgtagaatagtttatttccttacatgtactgtcttttccacttgtaggtgagcttctcttgggttgggaagggctgcttctagagtatgcagggtcctaggtaaacatttttttatggcctctggcaataaaaacaatttgactcacccaattcagcaaattagcaccattttggtggcccattctcacataatttcaagaaaagaagtactatgctggccagcaggaggcatccacttcccaggtcatcagtctggaactgggctcagacacagggctccctaagcgtgagtctggagctcctaaggcatctgtttgtccccactgaagactagcaggtgacagtgcaaagtagagtctaaggatggtaatggcatgaaagacacctttttctatcaatgaactgaatccaactttatatcactaatgttgactaaaactattccacagccatctctgaatgttctcaggcacagcatctaggaaacattgcctcagcctcccaagtaactgggattacaggtgcccgtcaccatgcccggctaagttttttgtattttttttttagtagagatggagtttcactatgttggccaggctggtcttgaactcttgacctcatgatctgcttgcctcagcctcccaaagtgctcagattacaggcgtgagccactgcgcccagctgataaagagtatttttattagttaatagatttcatggatttttgtttgtttaatattacatagagtcttctatctctgtgtgttggaatttttttcaatggaatctagtattgacaaattaagattgtcttgtaaaaaataaagtctttggttatacaagtgacataaaatatagtggctaaacttactacataagaaatgttataaacattccaattaaggatttctaaggtaagattaatagattgaattatttaaatgttcatttaaaaatgcttactatatatctccaaatttggtagtagcttttatggtgagaataaaatggataatatctaactttaattttaaaaaccctcagaaacaaatataattatgtttccaattatgttagtaaaataggataatgaatagataatggtatatttctgaccacatctgggtatggatgaaaacaatctctcaggttcatctagaaattacaatgtcatgcaattattcattttaaaagctactaattaataaatttaatatgcataaatataaagccataagaataaacatgtaaacatgtattttgctaaggaaacaagtataggtttggcttcctaacttgaaggactaaaaaaattcacaggagaatcaaggtacttcacttggacaagcaactttgcccggtgagattagactagcccagtgatttccagccggtgttttcagactcttggaatgtgttgtaataaggctaatatattgggatttagctgagctgtcaaccaaggctagcttagggtgccctttgatgtgccctgaaagcactcagtgcttagctctctttacagcacttaatgccgtgtgttgcaatttcctgcttaacttgtctgtctccaccagtggactgggaatttttgtagagcagaatttattttatctctagcatttaacatctaacagtacactgtatatgcctacaaactgttcactgaatgaataaaagtcatttgtttaactcttttatttgatgcatagatcttcttgtaatatcccagataacagttacccctgactttttgatcactctgattatagtatgcttttctgcccttgctaattgtaagttcttcttcattgatctgaaatctattactttattaattgtacactttggtcttttttacttttgagaaataagaaggaaaaacaaattctttagataaaagagataactttataaatctgaaggaacatggaaaatcttcagatttattctccttagtttgcagatgagattcagtgagattggagttttgtgtaagggacagtaacaagagtataatcccagaccatatacatcattggctgggtcgtctggcccttctattttatcctcaaatgactgaagtaaactattttacttcctctaagtctttccaatatgttttcatgttctgacctaaaagcaatactctgatctaataagtttaagaaaatatttaagtttaatcaggtttcttgaatttaatacttctcagagacttttatacattaatgtaccctgtgactttttaaggaatggttatagtatttttagtaatagaaactaatatttcaaggaattaattttcaaataatacactttggaaattgtggctctattctaaacatactccatttttccaggtgttctttcgatgaagtaatttgcagacatcccatgactaattttggcatgttcaaaactatataggaaagtgtatgcagacatagaagaacactaataaaggcccaataaaatattggaaaggcccctctaactataatttcacactatgtagccatctgggattctatcatttagttattcatgtggacaaataaaggttttcttttttaacacttgaaaacagtgagactgacctcttcttttttctctcaaatttatgaaattataattgaagtacactaattatacacatgtatacaatttgattggttttgatacatacatatatacacatacatacacaatagtggaaccatcatcaaaagttagatgataaatatttttattatcacagaatatttttgtgctcttttataacgcatcttgccctctacccctcctagcaactgatctgctttctatcactgaagaatagtgtgaattttctggaatgttatatacaaggaatcatagaatttgtactttttcaggactggagtggtttagcttcttttattcagtctaacaattttgtgattcatgtatattgttgcttatctatcaacactttattttttttttattgctgattaattttccaggtacagataagtaccacaattgtttatccattaatctgttgatgaatatcagagtcgtttatagactttgactgttaaaaataagtagctatgaacattcttaaacaagtctttgcatggatatatgtttgtttcttttgggtaaacacttggaagtgcaatggctgggttactttgcaggcatgctatttttccaaaatagtgtatttttcatgctgctagttctttagagtgaactagactagttatcttacccatctcttacaactgggaagtaagcactcactgtaggaaatggaaaaatcatgaaaaaggaagtacttttcctctaggaaggaagcgtaaagaagaaatgatttggattaggtacattagggaagggcaccttttgttaggcttctaaaactgtctactgggaaagtgaggaggtgcgagtactcaagtgctgagaacccatagactaattctcttatttttcatgtggtgctttataagtgaaatttgtttctactgtactgagatttcgaatgctgttattttccagtgattctaactctggaatcctaatgatacacacctgtgttgctcttacattgtacacaaggtgtctgcttctgctggtggctcatagtctatgacagaccttctatttcatagtagttttcttgacaaggaaagaagcagaggaatgtcacttttccagatggaattgtcccaatagcttttctttgtagtctgatttaagattatctcagatgggatattcaggacttactgttgcttgtgagagtaaacaaatgtaacttattgacaggatatttaattttgtaataatacaatactaaaggagaccattgacactttagctgtttaggatattgtttttcagttagctattcattttggacatgctatatgtgctaatgttggatttgtagcaatctatcctgccattataattttgacaatatatttgcacattttattattttaaaaaaacaaatgttatgccatatctgaagcacttgatttcaacatatttttcatactaaggagaaatatgtctgcaagtatttttaaaacatcaacattgtagtttattctagaaacctccaatttttgttctgtgttttgtgatttttgaaaacactttaggctttattttttgtttaaaattattctagttagtgaagcctaaaagcagttaattgaaattgaaactgaaggcactgcttagtttcataagaggaaggagagcatgagggagatttagtactatggtgtttaaaaccaaaacagaaagagtgctgaaagttaaccctgtcctgttgcattaattactgatgtttagtgtatacttttagaagtaagtacctatttgccattctgagtagaatatttgggaattaaaaaaaatggaatattctgtaaaatagataaaagatcctgattggtctaaacgactttgaaactgtactgattttaataagttctggtgttctgtaccactgtagaatgactatagtaagcaataatgtattatatgctttcaaatagctagaagaaggatattgaatgttcccaacacaaagtaataataaatgtttgagatgatggatggatatgctaattactctgatctgatcacttttactttatatgtatggaaacatcactatgtactccatagctatgtataattattatctgtcaatcaaaaattaatttaaaaaattaaaaagtaaagggcttgtttgagggagaacatacatgtagatgtgggatttgaattaggcttcccacagaacagcacagtatttcggattctaatataatcattttttgtatttttttctcactatgatttaagtaaaaacctacttgtatacatttttatagttcctggcctgacaggggtctgcatggtggtggtgctattcctcatgatcacagcctctacatatgcaataaggtaagtgtcagaatcaattattttgatgtgtatctgtcaggttatttagaaaaagtcttgagtaatcaaaatgtttaaccattgtagtgtcctggttaatggactattctgggtaagtaagagtgaagtatagctgtttctatacatgacttcttgtttctgaaagttctcttgtattagcaaattttctggattggtaagaaattgtgtatggagactgcatttgatgatcaaaagaattagagttcttcagaatttgagtatcttttgaaggatagtgtatctctatgggacacgggattgaaatcaatgtgtacatatggggaccttagaaattcctaggaatatgtgacttaaaattattttattttattatttcattatttttaagatttaacattgtgattttattttattttatttatttttttattattatactttaagttctagggtacatgtgcataatgtgcaggtttgttacatatgtatacatgtgccatgttggtgtgccgcacccattaactcatcatttacattaggtatatctcctaatgctgtccctccccctctcccaaccccacaacaggccccggtgtgtgatgttccccttcctgtgtccaagtgttctcattgttcagttctcacctatgagtgagaacatgtggtgtatagttttttgtccttgcgatagtttgctgagaatgttggtttccagcttcatccatgtccctaaaaaggacatgaactcatccttttttatggctgcatagtaatccatggtgtatatgtgccacatattcttaatccagtctatcattgatggacatttgggttggttccaagtctttgctattgtgaatagtgccgcaataaacatacgtgtgcctgtgtctttatagcagcatgatttataatcctttgggtatatacccagtaatgggatggctgggtcaaatggtatttctagttctagatccctgaggaatcgccacactgtcttccacaatgattgaattagtttacagtcccaccaacagtgtaaaagtgttcctgtttctccacatcctctccagcacctgttgtttcctgactttttaatgatcaccattctaactggtgtgaaatggtatctcattgtggttttgatttgcatttctctgatggccagtgatgatgagcattttttcatgtgtcttttggctgcataaatgtcttcttttgagaggtgtctgttcatatcctttgcctactttttgatggggttgtttgtttttttcttgtaagtttgagttttttgtagattctggatattagccctttgtcagataggtagactgcaaaaattttctcccattctgtaggttgcctgttcactctgatggtagtttcttttgctgtgcagaagctctttagtttaattagatcccattttcaattttggcttttgttgccattgcttttggtgttttagacatgaagtccttgctcatgtgtatgtcctgaatggtattgcctaggttttcttctagggttttgatggttttaggtctaacatttaagtctttaatccatcttgaattaatttttgtataaggtgtaaggaagggatccagtttcagctttctacatacaactagccagttttcccagcaccatttattaaatagggaattctttccccatttcttgtttttgtcaggtttgtcaaagatcagatgattgtagatgtgtggtattatttctgagggctctgttctgttccattggtctatatctctgttttggtagcagtaccatgctgctttggttactgcagccttgtagtattgtttgaagtcaggtagcgtgatgcctccagctttgttcttttggcttaggattgtcttggcaatgcaggctcttttttggttccatatgaactttaaagtagttttttccaattctgtgaagaaagtcattggtagcttgatgaggatgcaactgaatctataaattaccttgggcagtatggccattttcacgatattgattcttcctatccctgagcatggaatgttcttccatttgtttgtgtcctcttttatttcgttgagcagtggtatgtagttctccttgaagaagtccttcacatcccttgtaagttggattcctaggtattttattctctttgaagcaattgtgaatgggagttcactcatgatttggctctctgtttgtctgttattggtgtataagaatgcttgtgatttttgcacattgattttgtatcctgagactttgctgaagttgcttatcaccttaaggagattttgggctgagatgatagggttttctaaatgtacaatcctttcatctgcaaacagggacgatttgacttccttttttcctaattgaatatcctttatttctttctcctgcctgattgccctggccagaacttccaacactatgttgaataggaggggtgagagaggacatccctgtcttgtgccagttttcaaagggaatgcttccagtttttgcccattcagcatgatattggctgtgggtttgtcataaatagctcttattattttgacatatgtcccatcaatccctaatttattgagagtttttagcatgaagggttgttgaattttgtcaaaggccttttctgcatctatggagataatcatgtggtttttgtctttggttctgtttatatgctggattacatgcattgattgcatgtgttgaaccagctttgcatcccagggatgaagcccacttcatcatgttggataagctttttgatgtgctgctggattcggtttgccagtattttattgaggatttttccatcgatgttcatcaaggatattggtctaaaattctctttttttgttgtgtctctgccaggctttggtattaggatgatgctggccttataaaatgagttagggaggattccctctttttctattgattggaatagtttcagaaggaatggtatgagctcctccttgtacctctggtagaattcggctgtgaatccatctggtccttttttggttggtaggctattaattattgcctcaatttcagagcctgttattggtctattcagggattcatcttcttcctggtttagtcttgggagggtgtatgtttccagaagtttatccatttcttctagattttctagtttatttgcgtagaggtgtttatagtattctctgatggtagtttatatttctgtgcgatcggtgttgatatcccctgtatcattttttattgcatctatttgattcttctctcttttcttctttattagtcttgctagcggtctatcaattttgttgatcttttcaaaaaaccagcttctgcattcattgattttttgaagggttttttgtgtctctgtctccttcagttcttctctgatcttagttatttcttgccttctgctagcttttgaatgtgtttgctcttgcttctctagttcttttaattgtgatattagggtgtcaattttagatctttcctgctttctcttgtggacatttagtgctataaattttcctctacacactgctttaaatgtgtcccagagattctggtatgttgtgtcttttttctcattgttttcaaagaatatctttatttctgccttcattttgttatgtacccagtagtcattcaggagcaggttgttcagtttccatgcagttgagcggttttgagtgagttcttaatcctgagttctagtttgattgcactgtagtgtgagagataggtataatttctgttcttttacatttgctgaggagtgctttgcttccaactatgtggtcaattttggaataagtgcgatgtggttctgagaagaatgtgtattctgctgattggagtggagagttctgtaggtgtctattaggtccgcttggtgcagagctgagttcaattcctggatatccttgttaactttctgtctcgttgatctgtctaatgttgacagtggggtgttatagtctcccattattattgtgtggttgtctaagtctctttgtaggtctctaaggacttgctttatgaatctgggtgctcctgtattgggtgcatatatatttaggatagttagctcttcttgttgaattgatccctttaccattatgtaatggccttctttgtctgttttgatctttgttggtttaaagtctgttttatcagagactaggattgcaacccctgcctttttttgttttccatttgcttggtagatcttcctccatccctttattttgagcctatgtgtgtctgcatgtgagatgggtttcctgaatacagcacactgatgggtcttgactctatccagtttgccagtctgtgcattttaattggaacatttagtctatttacatttaaggttaatattgttatgtgtgaatttgatcctgtcattatgatgttagctggttattttgctcattagttgatgcagtttcttctagcatcgatggtctttacaatttggtgtgtttctgctgtggctggtaccggttgttcctttccatgtttagtgcttccttcaggagctcttttaggggaggcctggtggtgccaaaatctctcagcatttgcttgtctgtaaaggattttgtttctccttcacttatgaagcttagtttggttggatatgaaattctgggttgaaaattcttttctttaagaatgttgaatgttggccctcactctcttctggcttgtagagtttctgctgagagatcagctgttagtctgatgggcttccgtttgtgggcaaccccacctttctctctggctgcccttaacattttttcctttatttcaactttggtgaatctgacaattatgtgtctttgagttggtcttctcgaggagtatctttgtggcgttctctgtatttcctgaatttgaatattggcctgccttactaggttggggaagttctcctggataatatcttgcatggtgttttccaacttggttccattctcgccgtcactttcaggtacgccaatcagacgtagttttggtcttctcacatagtcccataattcttggaggctttgttcatttctttttactcttttctctctaaactcttctcacttcatttcattcatttgatcttcaatcactgataccctttcttccagttgattgaatcggctactgaagcttgtcattcgtcacgtagttctcgtgccatggttttcagctccatcaggtcatttaaggacttctctacactggttattctagttagccattcgtctaattttttttcaaggtttttagcttctttgcaatgggttcgaacttcctcctttagctcagagaagtttgatcatctgaagccttcttctctcaactcgtcaaaatcattctttgtgcagctttgttccattgctagtgaggagctgcgttcctttggagggggagaggcgctctgatttttagaattttcagcttttctgctctgtttttttccccatctttgtggttttatctgtctttggtctttgatgatggtgacatgcgaatgaggttttggtgtggatgtcttttctgtttgttagttttccttctaacagtcaggaccctcagctgcaggtctgttggagtttgctggaggtccactccagatgctgtttgcctgggtatcagcagtgcaggctgcagaacagtgaatattgctgaatagcaaatgttgctgcctgatcattcctctggaagctttgtctcagaggggtactcggccctgtggggtgtcagtctgcccctactggggagtgcctcctagttaggctactcgggggtcagggacctacttgaggaggcagtctgtccgttctcagatctcaaattccatgctgggagaaccactactctcttcaaagctgtcagacagggatatttaagtctgcagaggtttctgctgccttttgttcggctatgccctgccccccgaggtggagtctacagaggcaggcagtcctcattgagctgtggtgggctccacccagtttgagcatccaggccactttgtttacctactcaagcttcagcaatggtgggcgcccctccccaagccttgctgctgccttgcatttcgatctcagactgctgtgctagcaacgagtgaggttctgagggtgtgggaccctctgagacatgcgtgggatataatctcctggtgtgccgtttgctaagaccattggaaaagcacagtattagggtaggagtgacccaattttccaggtgccatctgtcacagcttcccttggctagccaagggaattccttgaccccttgcgcttcccaggtgaggcgatgcctcaccctgcttcagctcatgctcggtgggctgtacccactgtcctgtacccactgtctgacaagccctagtgagatgaacccagtacctcagttggaaatgcagaaatcacccttctctgcgttgctcacactgagagctgtagactggagctgttcctatttggccattttggaacctttgttaaaattattttaaagctattttcctgatatgagtttgtcttgctgtaaattaacatgatgttctatacaaaactttggagaaattgtttgtttgcatctgctaaaataacaaattatctgcattcatattgattcttatagttaagagattttgagcaaaatcagatacacattatcaggagcactttcacatgtcctttctaatggacacattcagtttttcagaatatttatagtgttgatgcttctgaacaaactttttagttaaagaaagcaaaaaaaggaatataagatatatttcctctaatcttcaagaatctccaattgttctacttgttcagatgtgaaatttaacagaaacacagatatatatatatgtatatatgctttgaaagtaattgccaaataatatacttaaatgaaactgtctttatagtttttaacctttgtgcacacacatacatacaccctaaaatttcacaagtctactcactacccaaagattaatactgtacatatgtagtgtatttttatagattaaatccttcttgctcttcttcactaattcccctcctcctacccccaaatcattttttctctcttatatacatatgtattttaccaaaataggaccatattagagtattacttttaatttactttttgcctaaatttatattatgaacatttttacgttaataaatattctgttattattctctttactgatggcacagcacatcgcaatataggtttttatacattattttcccagacccatattactaaatgttttgggtagattttgttttgtttttttttttttttggtatttcaattttgaaacaaacacccccatccatatgtctttgcatgctttttcaatgatgtcctaaggaaaaattcttagatgtagaatagctgagtcaaattgtaagaacacttttaaagcttttcataagaatgaaaaattggtgtacagaaaggcaactcactaacatcagtacatgagggtgccaattttgtggggagcaattttattttatttagatagaggaatcattaaaaaacctcactttttcaattttaggaattcttgaaggaaaattagagcatctgacatacttattttaaaatccttgaggtatagttttgtcaaatggaataaaaagatcagcttcaatcctgagcttttatatttgctctcataaacaatttaagcccttcctaatcttcagtgttttttatgctttgtttaaaatttgtttaaacaagattataacacctagtttgcttttctgttttattgttagaatcatgaaattcttaaatgaatcatggagacagatatctcttttattttaccttttctttttaccagtaagaaactaaagcactagacaaatcaagtgaatgaataagtccccagtgtttgatttctgatagtgaaatgtagcctcctaattcaaggagagttcaatatgggtcaatctgttaaaataattaatgtatcccgttattagatgacaggaataaattttctcatctcaattgattttaaaatggcacttactaatatgaactcaaattttgacttaaaataatcagagtaaataagctaaaaattaaaattatttacattgtagaattaaaaaatataaaagccagtattggggttatactcaagagtgaaacactagatgtattcctaagaaaatcaggaaaaaagcaaaagtatttttaattctatcaatatttacatatagtaaaaaatgaaacatttggaattattagaaaaagtgcaacaataaaataccattatttccagaaaaagtagatatatctactttttctggaaataatggtaattattaggtttctaagagaatccaagagaattacggaaaaatttggtgttaacaccaagtaaaagagttgaaaaggtaattggatataaatcaaatataaaaataatccttttattaactataattagtttgaaaaattgaataaaataaaaatataccacttacgattgcagcaaaacatataatatctggagacaaaagatatatgttcactaagagaaatatgtagagatttgaataaagactgtgtactataaagatatagttcttccttaattattatatatatatttttttgagacagggtctttctctctcatccaggctggaatacagtgataagattacagctcaatgcagccgcaaccttgacctcccaggctcaagtgatcctcccacttcagcctccctagtagctaggatcacgaacacacaccaccatgcctaattttattttttttaattgtatttattttttcgtaaggtcaaggtttcaatatgttttccaggctggtctcagactcctgggctcaagtactccttccacctctgcctttcaaagtgttggattacaggcattagccaccatgcctgacccctcaatatatatatatatttttaaggagtgttgcaatttcaacaacgttctcagacaggttattttgtttgttttttttaatttagcaaagtgattccaaagtttgtctggggtacatccaagtacatatttcaaaagaggagtaaaaggagggatgtgccttactaaacattaaaataattaaacttcagtaacttaaaagagaatgggacttacttgcaaaaatgactaacacattgaaccaagggacaaagtcagtaaaaagccctgtaaatgaccttgcaatatataagaacctgcagataataaaggtggcattacaagcttatgaggaaagtaaagtttaagcaaatgtaggtctatctaaattacacatatgaattaaaaatactctatagaaatgggtaatgattataaacagaaaggtcacagaagaattaaaagtaacagacatatgaaataataccccatcctacttataaaaaataatgaaaatttacaaaatttagtctgagtttttgggaaacaggcactcctagcctacagttgggtttgtaattaataaatacatttttagagggcaattggcagcgtgtattaaaagcattaaaaaggtgtatcccttaattttgcagttcaaattctaatggttttgatttaaagaaggatcagagggccaagcatggtggctcacacctgtaatcccagcactttgggagactgacgcaggtggatcacgaggtcaggagttcgagaccagcctggccaacatggtgaaaccccatctctaccaagaatgcaaatattagctggtcatggtggcgagtgcctgtaatcccagctgctcaggaggctgaggcaggagaatcacttgaaactggaaggtggaggttgcagtgagctgagattgcaccactgcactccagcctaggcgacagagcaagactgcatctcaaaaaaaaaaaaaaaaaaaaaatcagaactttgtatatgttacaagggatggtaatgatactgtttatgataccaaatactatgagtggagtaaatgtaaagcaattgcttgctgcttaagtaagggtttctctaagagtctatgggaagcatcagattcatctaggaagcttttgtaaatatctgccctctaattccaatattctaatatataaaatccacccaggatatatgaaataaaataactgtttctcttttacttctctcaaacattctgtagattatgcttatcattctctgtcttttcagtgtctttgtcctcccccagagcaataacattgaggtatcattcttgttacactgtccaggaaaaaatataacactttggtcgtcatctatttcatttatctctttttgagtttcccttgaactactctcaaaatatgtattgaaagaggagctttggttgttttggaaattatttgaaaactgagaatattgataaaataatagccaaagtacatattagcagactactatctgcttcttagccttatatcataataacttgaaaataaacaacttatttttattatttccatgtgtctttatttgaaatacaaagaacttacaaaatgataaaatcttactcataatttttgtcatttctctctatatactgtgttaatactttggtattagtagattaatatgatgtactcatgttttagcttttttaaattgtgagatgtttgaaatgatacatggtatttttgatatttttagtaagatggaatgtaaagtagcattaaaatgagtgtatttgtttttgcagagtttctaactatgatatcttctggtatactcataacctcttctttgtcttctacatgctgctgacgttgcatgtttcagggtaagtttacaaatgtatgtatttaaaaccatttgtgccccaaaatggggtaatgaaagaaaactctataggaaatttcataggaggtggtaaaagtgtcaagagtgaaagaaatagtttctctactattgaggataacgtcaagaatggaagaaatagttttatttttagcatagcatattgtaatgaaaccagtataaagtatactaaatttaaaagctagaattacctctccaacaacctttcagtttctaaatcttcctatggatatatcctaatatcttctaaatgaaaaaatttaagaatgaagaacatcaggaatatattttagtatttgtatttcctgaaactgtcctgctaaagcaagatttataataatggaatttccagtttttcattttaaaagttctacaggaagtaatacttgcagagagagccaaagatttaaaataaccaaagaaaaggatctgtcaaaatcaccaaggaaaaaaaacataaagtgaaaaaataatgtatcctaagcttattacaaagagtatacctaaagtattccaaaaatatgtgtacccaagcagtatactcaaaaacatggtgcttaaaacaatacatgaagatagatgaagaaaataatgtatttttgtacatgcatatgtctgtatggccaccggcagtgaacttgatggctttggcgtgacattcacacctgcatgacataataagtctggcagcagttttacttggtttggcaagatacagggcaggacacacagaatgtcaacaggataatgtcaggtgcttattaagtagaaatccctatatttgctcagaagcatttacccccactccttcatgtagcaactctaagataagaaacccatgtgggtaagcatggtctaccttgcattgggtaaggctcattcgtactccacaggaacctgtatcttgggaacagcataggtcccctcaagggatgcccttgggatcaagaacacactgtacacaaggaggctgaggtctgtgaggtccaaaatgatttcatagttcaatcacagtcctttctgtccagatgcatttcaccgataataaacaatgttgctggtaacacagctgacaatccctatttttcttaacctgaaatatttccagggaaacagtttgaagaaaggttcagacctttgtttagttctttcttcagaatgttttataatgtaatttatcagtacagtgggtcatttacattgatcatatatttatttcagggtacatattcaaactgttgctttggcttttttccacctgattttagagactgctgattaagacagcagtatcaaatatcccatatgtcctggttagctttgttcagtaccaaggttccagaacacatagttgtagagcactggaaacatggccacacattataactaattctctggagcctcagggcaccgagaaagcccttggtagataaaagactgctttacattctgctctttaaatgggattggttacctgtccagggctatgctcctgaagaggactatgaataaccagatacaactaatgataataacagtaatctaaaatagttacataatgcttactctatgctaagtataaattcaaaatgcttcacatactttatgttattaaatgctcagaatgttatgagaataaataatattgttaaacctctttcagaagtgggaacactgatgtttagaaagattaagcagcttgttgaagtttacttaactgatggatcctagattcaaacctaggcattctgattcagaaactcctaagtttttactacaaggctttatttttttggagaggtctgtacttctgagaatttgatgttagtatttgtttaaatgcctttatctttactgctttgagattgtgatctgtctattcatctatgtccctatatcagatagatatagaaaataaaaatgcaatcatttattagtataattatatattattttgcctttatgttttactaaattaaaactctgaaaaaaaactatttctttgtaaatcaaaatagtgtcaattttttgttaaaggatcagcatttcaaacagacttctttttaaagaggaggattacattgagagttctttacttttttggaagtaaaaggaatgcatatttaaattttgatttttacttttatagaacaagtgtcatagaaagtgactttaatttatacagagaaatagtaggcatctataggatgaattatatataatcaatcaattattaaactaaattaatatgtatttattcattataggtagaaatgaagaaagcaattattctaattttgaaatatgtcatgcaacccatacataatacaataagcattctacagtgcacattttttccaggaaatttaatagatatgcttctggtatgagaaatgttactactgataacattttaccattttctcaaaattaaaaaaaaactatactgatgaaggattggcttataattaagtctatttatttgtgcaaatgttggaaacagacatattttaacttctgaaatacctagataactttgttcttcaacttttggttatacaaataaagtacaattgttcaaagtaaatttcttggatttatattgaaatttctgttcaacagtatgctttaggtctgaacagaaaatcactatttgcttagcattagcttctctgtccatcaatgtggtaagtaccataaggtaaagaagagcaatatattgcatgatgtctagtcatccagcattgatcattgatttggaattttgaaaaatcaattggaaaagctagacatattataaaactgcatatttttaaaatgtaaacattcatgtgttatttacatgaatgctagcaattcagagaattatcagtgtgggctagaaattctagaaaatattaggcttcaaagatgaggtgatgagacattgttgactggtttttctacctaagcagacttttacagtaagagcatttgcttcatatgattttctaaggtcatttttttcatagaatcttaaattttaaaggaagctgaaaagatatcttgatcaagcctcttttaagctcctctgcaatttatctactaagtcaatgcctaattttgaagatgtccattctgtcttaggggaagttctaattctcacaatgttctttcgtttttggttggaattattttactgtaatttctgtctagctatttaaaagtctgtgattctggaggccatggaagttaagtcgcccacttttctaaattctattcatctgtttctcacgttgtgatatttcagatctcaattttctgaactgtctcttcgaatatattaacaattaatattaattgaatgcttctcttttactaacatttgctctcattaaatcctcctaacaaccctgtaaatttattattattattattattattattattattattattattctcaatgttcagctgagagaataggagcagtgagagataagttgctgagggccatggctagtaagtagatttccagtttgaacccaggtatcaggtaccaaaattaacattcttaaccactaagttatgctggcccccatttggcaacacttctctgtatcccttttaaaacttacaccaaactaaatgttcttggagtatgtgatctgattttggcagagtgaaagtctcactttcttcactacaaacattgcaatcggtattatttaggacccaaattttttgttctatgattatctgtgcccttggcttaacctggttttcattcttgttgtatattttagcgattttcttcattttttataaataaatctgttgcatgccaccctaaaaagatgacatttcatgtacactaaactagatgtttctttttagtgttaaaatacatctttaaaatacattaattttcttctccaagatgttagtatattatagaagttaaaagatacatcacttaatacccgtatgaacttggcagataatttgtccttgctttttgttagcaattaaatgggattaataaaatcacttatatcatagtgttgtcttgggtttaaagtaatgcagcaaagtaggcagaatatagacatacttaataaatgttagtaagaacaaattatactagtaccaatacttatagctttgtaagaatgacactccacatttaactttgaaaaatcaggttttttgataaagacacaacacttttgaaaaacccagattttcttatcaacaaagtaatttgatgaacatagtgaaaactacttagcagctcaaaggaatattccttgatatggcaacaattataatattctaagatctctaacattctattgatttttagcaataaaggtttatctttgcaaaacaagccttcctcctgaggaattttttgttttgatttttaatatacctttttgggaggttgctattggtgtgcttaggaatttaaaggtattcaattcctaagatacctggtgaaaacaaaacaaaacaaaaccatttcctctttccaaacatgtatagaactggatatctctttcctcattttcttttgaaaaactcagaaggagatgcatactgctattctcacttactgataaaaagagtattggagggaaaataaattacgaatgtcacagtctctgcttaagagcccaacccagctcctttcgaagaaatgtggagggaatgcattgtaaatgagatttggcaccttagcttctgcagtcttaccatagtcaacactcccactggctttagcttggagagtgctgtgtgggtggtgattgtattttatgtctttatttaactgagtgagagagactataatgtgataattctggaaatgatagaggggaaggtcctcctcaaatgtttggatgacaatgacagcacattaaaagtgtaaatatttttttgtgctagctctgctgcacttctcagatctttttattatatgaatgatacctgaattattcttttaagcagaactctttgccatttggcactacttgttagcaagagttaatcatagagcatgatttatattctacttgaatcattttttttctaggaaatctaaaaggagtatttttatgtgcatgtttttaaaaacatttattctttatgccaggggagcacagtgggcaggctttgtcaacagtgacattaatgaacccccggcagtgtcataggcggatagtttaacagggagcatcacaggagtttagactcaagatgttaaccagggttagacagatattgtgggggtcggcttattgtgctgactggaaaataacctccctctattatggcctcgggcctcaggaggaggacattaaggatatactgttagaggatagagatatttgtgcaatatagtgaagtgttaaggactgctgatacccaagtatcttcccttttagaagccactttcgtggaagtcttccttcacccacactgatgtggcagagggaaaagcttggtcatcttgctactggtgggaggcacttgctcctcttagaaagtcaaattgcattttgaatggaaggcccacaagttgtattttaaacaatcctattctagtactgagggagaaaatttttactttcctctatgttcttttcagtttcccatttcttgcctgtacatttgcagtgactttgtaatttattgtccaaaccagatacttttgagaatgaatggggatgctattgataattcagcagtggctatagaaaaaccaggtcatacaggtattctacctactcctaggcagtggggaaagttttaagagaggctaatgcactgttttaatgtagactttgagctagagccacaaaaggagtccttaccttgaataggggctctgtgtgtgtatttgagaaacagaaccttcaaataatacacactgtaggtttgcctagctttgtctcactttagagattgtaattagatgtccactaccatggtcattagaaggctgaggatttggttgttcatgacagtgggtaaaatcttttataaactctctgtcactgatatagatgacctgttctaatacttcctagatgcctagtttctaatgagtctggcatactcgttatcagtttggtgcccattacttctatcacaaaattctacttctctttccataggataggggtttttaacatggctccataatccctaggactaattgaatggattcagggattcattaattcctgaaatacatacacacacgtatctgcatatttatgtataagtttaattttgagacacatatgtatatttttgtataaaacaagtttctcaactttcattagataccgtaaagtttgtgtggtcaaaaacgtttcaaaaaatatggaactgaagtttttaaagctagattttaaccaaagagctgtaatatctaatatcacattgacacattttatatagcctacttcagttttatttagagttagaatcactgcattgtgggaaaaataaaagccactggggcattttttttcttccatgaaggctactggaaaaagaacttgacaaatataatgaacaacttaacaactgcattatcattttagaggataataattatactgttcataataattctctagttttagataatgttgactatgtgacagggactattcttagcactttacacacacacacacattaattttttgtttgtttttaatatgcacagtactataagttcttctatcatttctattttacagatggggaattgaagcatgaaagattaaattaagtaactgtctaaagtcacacagctaataactgaaaaaactaagattgagcccatgaagtttgacccctgaatttaacttctacccttttcttgaattattgaattatttatttgtcatttagaaagtactcttgcttatgaatgaaaaatatttatgtattgtaaaaatctaggatatatttttctattcgtccatgtaagttggtgagtatatatacatatatgtttgcctgttttgaatcagaagttcaattttgattcagggtacatagagttcaaggttttgaaggtgaaatctaactagctcccagaaaatggagtaagaagaaaatggcttctttatggtgctgcctgataaatgtttcctaaaatgtttgaccttgttaagatacataataatatgataactctataatataatgtaatcattttataataaatctaataataaaataaaaaaaatgtgatactttacttgccagaattcttccatgtaacctgaaaataacaatgaagaagactaggatttagactggagcagataaaaatgctgtggaagagatattcttatcagtattttattgccagtgtgtctttataaaaggattaagtcaaaacatagcaaagaaagcaatggggaaaatatattattcatcatatagaaaaatcaattaagtccacagatttccaaaacccataccttttagaattttgctatgaattttctctaaatattagattacccatccagttattattcaaatgtgtgggatgaatttgataatggaattccaaagtaaatacataaacgaacccaagtaagcatgcaatttgtgaattaccatagttttgctatcccacacattttggtattttgactttaaaaatagtgaaacaaatgccctgggttataatagtgaagaaagaggattgattcctagaagatcactaatcttagacaaatcagttttttatagagcttcctgatttgtgcaataaagaaaaataattgtatctcccagacctattagaagagaaatattagctatcatacataaaattgacactatacacacacatatacatatatacacatatatttttattgttgtctatgtaatgttctccatttaaaaaacttttctatttttaatttttatgaatacatagtaggcatatatgtttatgggatacatgagatattttgatacaggcatacaatgtgtaatgatcacatttgcataaatgagatattcataatctcaaatatttatcttttctttgtgttacatacaaattgtactgttttcattattttttaatgtacattattgttgactctagtcatctaattatatttttataaccaatactcatccccacttctccccctctcattcgcagcctctggtaatcgtcattctactctctatcttcacgagttcagttttcatttttagctcccacaaataagtgagaacgtgtgaaatttgtctttctgtgccttgcttatttcacttaacacaatgacctcagttccacccacgtcgttgaaaatgagaggatctcctttttgtggctgaatagtacaccgttgttatatgtagcacattttctttatccattcatctgttgatggacacttaggttgcttcaaaatcttggctattgtgaatagtgctacaataaacatgcaagtgcaggtatctcttcaatatactgatttcttttcttttgggtatatacctaccaataggattgctgggtcatatggtagttctgtttttagtcttttgaggaacctccaaacttttctcccataagggttatgctaacttacattcccaccaacagtgtatatgagggttcccttttctccacattctcaccagtattggttgttgcctgtgttttcaatataagccattttaactgtggtgagataatatcgcattgtagttttactttgcatttatctgatgatgtgatgttgagcaccttttcatatacctgtttgctatttgtatgtcttttgagatatgtcaatttagatattgtgcccatttttaaatctgattattagatttttttcttacataactatttgagttatttatatattttggttactaatctcttgtcagatggatagtttgcaaatattttcccccattctttgggttagatctttactttgttgatgtatgctttgctgtgcagaagctctttaatttgatgtaattccatttgtctatttttgctttgattgtctttgcttgtgggatattactcaagaaatctttgcccagtccaatgtcctggagagtttccccagtgttttcttttagaggtttcatagtttcaggtcttagattaagtcttcaatcaattttgatttttttaatttaggaagagatagagatctagttttattcttctggcatgttgtatttccattatcatgcatttcaaaaagttttaaaatttcctcaataatttcatcattgactcactggttatcaggagtatattgtaaaatttctgtgtatttgtatagtttccaaaattcctcttattgatttctagttctgttccattgtggtcaggaaaggtgcttgatattatttcaagtttttgaatgttttgagacttttttgttacctaacatatgatccttgagaatgacccatgtgctgaggagaagaatctgtgttctgcagccattggataaaatgttctgtaaatatttattaggtccatttggtctatagtgcagattaagtctgatgtttatttcttgattttctgtctgaaagatcggtccaatgctaaaagtggaatgttgaaatctccaactattgttgtatttaagtctttctctctctttagccctaataatatttgctttacgtttttgtgtgctgcagttttgggtgtatatatatttacaattgttatctcatcttgctgaattgacccctttatcacattatgatttttttggtctcttcttatggtttttgtcttgaaatctattttgtctgatattaagtatagcttctcctcttcctttttggtttccattggcatggaatatgtttttccatctgtttattttcagtctgtgtgtatcttcataggtgaagtgtgtttcttgtaaccagcagatcattgggtctttttgtttctccattcaaccactgtaagtcttttgattggacagtttatttcattgacattctatgttattgctgataagtatggcctttcttgtaccattttcttatttgctttctgattgttttgtggtcttctctttcttctttccttccatcctgtcttccttttggtgaaggtgattttctctggggttatgttttaatttcttctttttctattttttatgtatctgttgtatgttttctgatttgtggttacaatgaggcttgcaaccaatataacccacctcaggcccacagtgaggtactgcgtagctactgcctatgttcattcaaggcccaaggactcctcagtcagcttgtagtgaatgcttccaggcttgggacttttacttcaggataatgcattcccctctggcccagggagtgtcaagaaatgtcatctgagagccagtgcctggaatcagggaaccttgcttggtgctctaccccactgtggctgaattggtatgtaacctgcaagacaaagtcccattcactcttccctttccttttcttacgcagaaggagtccctctccataacaaccacagttgggaatttgctgggtcacacctaaagccagtacatctctcagtctcacccaaggcccatggcgagtactgcgtgggtaccactgctggttattcaagggccaatggctctttagtcagaagatgattaatcttgccaggactgggtccttctcttcaaggcagcaagtttcttgcttgcccagggtgtgtctagaaatgtcatttgacagttagtgcctggaatcagggcctcaggcctctgcccagggccctatcctactgtggctgagctggcatcccagaggcaggacaaagtcctctttattcatccctctcctctcttcaagcagaaggaagaggtctctcccagaactgtgagctgtgttgcctgagcttggtagagaggtggtgcaagcactctcttggctgctctggctagtgtctcactggggcgtgtgccacccacatcactggctgtgagccctgcacagcaccaggacttgcagggaatttcagtcctttaaacctagactgcctttcaagtttatttacaatcccagagcactttagcccaaaatggcaaggcttgctgagacttaggttttgactgctagaatgggcaattcctttttggctagtactgggtctaaatgctccctctgtgggctctggctgagttcctcctggtgttgcttttcattgtgacagggcaacactgagttctcttctccctaacctccttatgtatctgcgagttccaacccaaaaaagaaaaataaaatagaacattgtgccatattctaggtaaactatagtggttctggggataggagtgtttatttcccatctttatgcagggaatccctttcacatatcactcactcagtatttactggatgaagctgaattgcattaattagtttaagctaggaatgtgttgtccttctaggctcttccaattttcctcaagtatcaaggcattacagatgacaataaaggataatctctaaatttgtttaactataacttggactgtcattttgtaactatcatttatatttagtcttatctaggtaattagttattatggcaactagtatattgattcccacgccaaaggaattagcttttaaatcttaactattttgattatattgtagactggcacatttttgttcggggtctttatgcatttctgtggctaaaaaatctgaaagaaaagaaaacccatgcctcttattttattttattttattttattttttgagacatggtctttctgtgttgctcaggctggtctcaaaagtctggcctcaagtaatcctcccagctcagcccctaagtgctgggtttacaggcatgatccagcatgctcagacccagctctcctgatttgttttatttcactttttagttcttcaatttttcacttaaatatatggggtgaaaaatattattgaataattagatctctcttagatggaatccaaattcttctcctccataatatttacatattttcaatatgttaataaatacaatgtcctatataactatgatctttaagatataaagtttttttaactttatatcttttgtttgccaacttccaattttgtttgccaacttccaactttttattcattggatttttaaattttatgtaaaaagtagtatttctctatagtaattatggactaagatcttatggtttattcacatttgttgatattttatgctgtaagccagttggcagtagggattgaggtcatgtgatatttaccccattaacgatgccttacatttctatagcttgtatgtatatatgtctgcttatatacatatagtatatacagaacatttttatgtacatgaagtcatttatgctgtaagttgtatatattaatggattttcttaaacttccaaactgcgagtttattttttccccagttttggagatagaccaaatactttttcacataatttttatctcagtttttctgcagggaacttttttatattagccagtgttcacagctggtattacaagatgagaaagttgggggaaaggaggaggaaaaagcactgtatttatttaagaaacattttcagtatagtactttctgaaacatgaaataaatattttatcctccactgtcattttagtgaagcatgaaagctgaggaaatactaagaagtaatggatgcttacctttttttttctttgcaaggggtcaaagctcttccctttttatacccgtgaagtacagaggaacaggtactatttctctttttcagttaaggaaacttagggaaatgacctattttacttcaggtactcaaggaagttgtaaatgttgatcctaagcccttaagaccctaggctatacattagtcagctgcacagagattgtggcagaatcagctacctaatttgcagggcccactgcaaaatgaaatgtgggattctttgatcaaaaaattattaagcgtttggagataatgacaacagagcagtaaaccaatagcagggtctttctaaagagcaaggtccggtgcacctgcacagattacaaacacatgatgttattcctatcttgtaagcttggaccaccccaccagtaagagctagacacaattcctgctgtggttaagctgcagatgacagtactcttagctatcaaaggcaagagccaggaaagaatgcagaggcaagaactctgttaggccagaaaaacaaagtaggggtgggagtaaaagctttggtagggtgggtacccagatacttaggatttcctgaggcacactggatctgtagtttaggaaagcactctacttctaaatgcacctagcaagtagactttactctcttgataactgtctgttacttaatgttactgtctgttacttaataactgtcatgttactacatgccatttgctaaaatatagacctcctttttgaaggttgaaaatgaggtcgaatatctgttaaaaccagatgactccccagtcaagtgtttcaacaacaatcacaacaaaagttgtttatatacttctggtcactaagttaatcaatgaatatttattgagcacttattataagtcataagcactattttaggcagtagaaaaatagcagtggagcaggataaacccttgactttaagaagtgcacattctggtggattctacagaagttagagaactgcaataaattttaaaatacacaatttggttttattgtttgaattaaactctttttctttgtacttgaagcaaaataaaaataactgtcagaatcaagatatatttttaccataaagaaaaaaaatcatattataaaatattaggaaaaaaagtaggttcctaagggataagaatttttttctcctccttcaagatagattaaaataccacaaatataaaggtcacataagtgacactcatttgtgggatatttttaacatgaaattaaagtagggatgattctggcattgtccttttgtcaggtgtggtattttgtaatatttatcttttgccataaaatcatgttttgattaccataaaatcctgttattacttagtaggattcatttaatgtattatattattttataagactttgtcacagccgggtattaaaaagaaagaaacaaacagaaagcaaaacaaacaacaaaaacaccaagatagtataattataatgcctcttgagggaaacaagggaaaaaaaagaaacctacaactttgaaacatggttgaaagtttgatagcacatgttaagatccttttgaatgcagaaacaattttgaaactccataaaatcctttatttctcatgataggagaacactagacattccacagatacttcaaaatttctccttggaacatcatataatgaaacttaaaacattaataataaacacttatatttccacatagtctgtgcacctcctttcctcatccctcaccatgtcattataacttggcaagactctctgtttaccattcactaatgtctttttcccttcttgttttttgctttaaaattatttagcatttgtttatgaaagctacaacaatacatacaagaatgctgtctttttgattcctacatgatttgctatattaaaacaaattatgtgtttattgtttgcttttaaaatcaattcactagaaatgcattagagatctattatgtgcaagaaaagtattagagggatgcagaggtttggcagtgagtatgaatgtataagggataaatgcataagacatgatcccttctacttattcaggaataaaccaagtacctttgtgcatatggcttcctcatattggaatgccattctcctattctctaacccctggaatctctacatccttcagctgccttcttctctgtgaagcctttctggaattttataatcaaagttcattacccatctctactctcaagaggttatcatatgtttatatggcattaataattttgccctttttaattatcatttttggttctatgtttgatttgacccattatatctgtgctgtggctattcaatttaaattaaagtgaaatagtattaagaattcagttcttcacctgtactagccaaatttaattgctcaatagccacttttctctaatagttactatgttggtcatcagagacttagaccatttccactatcacagaaagctctattggacagtgctgctctagactgtgcatgcctttgaaggcagtgaccataatattgaaactaataagattccaaaattaataaaataatatgtctaaatgaggtatatcacagtggcggtgtggggcaagaagcaggggcagtattgtttggcaaatagacacagagctttgtgttatcttaagtgggttctgttacatttgagaagatttcattctactttaaagaaaggcatgcatctaaaataaataaaggtaccaggaatttaaaacaccataaaaatcatatagaacatgtgcctcaaattttaataaatgtggccacagtgaagtaaatggattagggagataatatcagattttgtctatcaatccaaatatccttaatatctagtctacattccttttcaatattctttagaaaaagattgttataatggccttcaaatataagaattctaagaaattctgcactaataccaaagaaatgagcacttttactctttactcatacaatgaaaaagtaagttattgcattcaattgagcttgaaaaataacacataaaagtattggtttgataaaacatgctccctccgtttctaagtctatagccatataaagccatcaaattttgctcaatgtatacattggtcttcaatttaaagattgtccataaagtagtgtggatattttgcaaggggaataggcctggtacagaggaaggagcacagactttggaatcagactaactgggctttcagtcccagctctgcagactgacattattgtgttgggagatacttaagtactcccaatctaaggccactaatctttaccatgcaagtttttttttttttttcttttttaaccagtaggtggcctttcaatactgagttaaaaacctgccttccagtgaactttcagtaccttcaccacctaattacagccaaatgacctgggatgtcatacttgagtttttttttttttgatgaatgattttatcattgtctgtctttagatcttatccatatttctttggtggcaagagttacaactaagacaaagtaatctgagctctctattctgtttgttttttgtgtttttaggcatataccatattgtttttattactatagtcttgaaataaagcttgaaatctgaaagtaaaaaaagaagacaaagtaaggacagttttaatggggttttaggacagagatggcctatgctatttagcttgagtgtagctgaacataatacaaagctctcaaaattaaaaggaattttagaataatacgtgccactttatgtgccaagaacagcacaaatgtttgattgggctggcctgaagaactttactgtatagtaacaacattcactactctaaggacctagagcatggtagagttatgtccacttgaatgttatgacaggagaagggattaacgacatttatttgcctggtattaagaccctaaattataagcagccccattccaacacacacacacacacacacacacacacacacacaatctgacttttgtttattttgaaccccttttacaatgcctacctatttaaccatctgatttgctttgcgtgacataggggcatagagtgagctaggtaggtttctgaaccctatgctttgactatacttagttaatctcttacctgaatgaaagccttaggtttctcatctgtgtaatataaataaaaacacttaccttgtatgattattttgttttgaagtttaaatgagaaatagatgttctaaaaattactgatatgatactttcttagcaagcattaatcttcccccttccttacatttctcagagttatgttgtgaggattcagtgaactaatgtgatatatcatgagaggtgaagagcatagaatttgaatcagatctgaattcaaatcttggccctgctacttatcaactgtgtgacactggggtattatttcatcttttaaaatatttttgtttttaaattttaaaatgggaataatgatcctagttcatgcagtttttgtgaggataatgtaaaatgcatatacatttccctgggctagacctggtgttttccatacattactaagctattattaaaacactaccccagttactatctgtagtctgatttatgttcagcttctttgaagatatcttccaaactagatcatgagtttctggagtgttaggaggcggatttgactctgttgaagtctgaagaaccattggagtagtgctaagtgcattatgctcatgtctgttcaacttttggccagtagaataaatgcttggggttttctacctacttagctatcagtcactatccttccgatggccaataggagcaaaaggtttgggtaaattattaatgtaaagaaagctgaatcaaattcctaggttgtctaagtataatatcccagcaattgtattgggtgactagaaacttataaatgattagtgacaaaaatttggctcaattttgtataatatttatcaatttatctcatacataggctatatctactgtattactttaaaaaaaatgtatgtttgtgtgtggtctactatgatgtcatgtaatgcatgcccctgacatgtactgaatgctccctaatgacttcatgatgactagttttaaggaagaaaataaaatttaaaaaaggaagtgagcataagcaaagagggaagaaaggaaagtgatcaggatgaggagatggtgaatacaaccagagactggcctggtcattgctttcctaaccttcatatatggatctcttagtatcattatacagttttgtttaaaaatattatttttgtaaaagcatcatagctgttatttatttatttttgagacggagtttcgctcttattgtccaggctggagtgcaatggtgtgatctcagggtcaccgcaacctccgcctcccgggttcaagcaattctcctgcctcagcctcccaagtagctgggattacaggcatgcaccaccacacctggctaattttgtatgttttttagtagagacggggcttctccctgttggtcaggctggtctcgaactcctgacctcaggcaattaaactactaaaattaagtatttgagagcatgaaagataatttaaaaagcatgtactgtaaaccaaccaaaaacagataatcttggaaataaatttttccttagtattctttaaaataataaaatatactgcaaaattttcaagcatttccaaatcttactttgtcatgcaatacttgcttatgcagcagtgaccttgttgatgctatgtacaatctgtcattttatggattatccctactaggtagatgttaaccacttcttgacaagaaaggcaggacacagaaagttgaatggtttgtcttggtttctcacaaaataagaaataatcagaatgagatttttatggtgtgggctctcctgcctgatttattattttgaactttttatgtggttctgtctatggagaaattgaaaagtaaacagatttagggactgattgctgtatatacattgttttcagaccataggagagacaaacttccagttccagttatttctgtttaacatttctctgcaaatcagcaaggcttgttttatccaggcttggccaagttaaatatattccctgtatttttcccttatgtttggatatctagcaaaatattcctcattatactgtttattgaagtgaaaacttgtatgtgattgtatgaatgcctaatagtcttgaagtaaaggccatcaaattcaataatgcctggagagattgcatgtattcttctctaccacatatttatagcatttgtttggagtgccaaaatttttgttttagttctatagataagaatttctcaaaattttttaagatttttcaatttctcctaaacataatacataaggaacactttttggataaatgctgtgtaaagttagcaaacaaaaacaaaaacaaaaacattattttcttttaccgtgtcccctgatctcaaatcttttcatttctctgtttgtttgttttaaatgtaattttagagggctgctgaagtatcaaactaatttagatacccaccctcccggctgcatcagtcttaaccgaaccagctctcagaatatttccttaccagagtatttctcagaacattttcatgaacctttccctgaaggattttcaaaaccggcagagtttacccagcacaaatttgtgaagatttgtatggaagagcccagattccaagctaattttccacaggtcagattaattttgtgtttgatctccacaaagtttgtttccatttgactgatcaacatcacatataaatgtgtttttcaagctatatattcatgcataataggatatttcaggatgtttcaacagtaagttagtacctattattccattacaggtacctgagagttcaatgcaaaaggtctatgatattagaggatatataacatttctacttaactgaccatatgacctttgcatacaacagcattggtgcttgcagccaagagatgacaaatattttttcccatcatttgagaaaagctgattgaataataaaaatagtagttaaaaaaacctaccaccaataccacaaattattattttattgtattatattattatgtataatattgtaaatagtaaatagcaaaatcaatttattgaatgcttaatattatctgccaggcattgtgctaaaatgtcctgtatgcctaatacagaacacttattagacatacagaatgtttcttgcaatattcgcaatgactatttgaagtaattaatatcaccctcgattttctgataaagaaattgtacttaccttgatcaaaatctccaaaccagtaagtggcagaggaagcatgtaaacccaggtctttgactaatatgcttgctcctggtaaacgtccataagtattcagcgattagttcaataagggcccttatcttcctctgtgcctgtgagaactgcccccgtgcaaattacaccttttattcctcacctataaaaagtggaagtaggaaatagtgatgtcaaatgtctctattggaagagaagaaagagaagtcaaaagctagaatgaatttgtagatgactttggaatagtgtattagtcgtgtttattattattaataataatcctctagatccctattagcctctataattttcagaacttttctgagtttcacataatattcacaaatattagggcaggtatggcgactcccattttgctcatgtgggacctgacactcaaagagtaagtgattgtctcaaaggtgcaaggctgctacattgcagaccttgtcttgtagtgctactcataacacagtgtggggctaaatgttattatatgcagaagaggcatggtctgtctgcatgaaagaaggaagatttgaaacaactaaagtgaggctttaaaaagtgaccattaagacaagttttagttggaggcctcaaagggatgtgaaagataaagtgtgtaattttaggagaacagtaagccacataggcttctgcacttcccaaagtttgcatgtgtcctgggatcagggctaaccatgcaacacatattcaaaactgtcatggtttccaaattataaatattattttatgttcttattatattatataaaagtaagtggtaaacaacatgcctagcatattgcatctttaaacatatgtgctatacatatttaacatatatatatatacatattatatgtatgtatattatgcatatacattatgtacattaaaaatctagggttttcttatttaataaacattagactgttaccttatttctaaaattatccccagatttatcggagattgttaactcccctttattcttttattaaatatattgtgtatatacattacatatctgtaggcatagaaaggtgtatgaaagaatatatacttgtttgctcatggatagttacacccagggcatgagattgagggtagggtcttgatattactttctgttttattttatacttttgtttgtttgaatgatagtgagcatctattattttttactcatttgttatgttttcttatttaaaatacaaattaaaatactattactgtaatgtatgcaataagcaattgggcagggtgtagatttctacaatatgagtatttcttgaagtatattttcaaaaatttgtcttagacttggctttggatttctggacctttgtgcctgtactgtgccgaaagactttacaggtatatccggagcaataagccagtcaccatcatttcggtcatgagtcatccctcagatgtcatggaaatccgaatggtcaaagaaaattttaaagcaagacctggtcaggtgagtcagtggtcagcaactttttaaatagcctttatccttatgtaatttttggaatttagcaaacatagcatcattgaaatagttgaaattcttaattggtcatttaaaacttatctgtttgttgctttttagtatattactctacattgtcccagtgtatctgcattagaaaatcatccatttaccctcacaatggtaagaaacatatctcttgctttttcacatttgtagggtgctatgcatatttttctttttttgtgtcctgtctcattctaaaaggtattcaaggctatcatagtactcttgatgtttaagtaagctatctttttacaaggaaaatagttatctgctcaagaactgtgtaactacactttattattttttgacaccttgcaattcaggaagtaatgaattaaaacgtattaaagcttgttgattcaaaatataggccaagcacagtgactcaggcctgtaatcccagcacttttggaggtcaaggtaggaagaccacttgagccccggatttcaagatcagcctgagaaacataaggagacactgtttctacagtaaataaaaaaaaaaagccagatgtggtggtacacatctgtagtcccagctactaggaaggctgaggcaggaggattgcttgagccccagtgtttgaagtttcattgagccttgatcccaccactgctctccagcctgagcaagagagtgagaccttgtctcaaaaaacaaatatatatatatatatatatatatatatatatatatatatttaatttcttgaatatttacttttctccttttatggagtattttaatgtatatggaaatcttatatatgcacaattttctttggagatggaatttaggggaaatacggatactctgggttgaggtggaaacattaaacaaaacaggcagtgtttagaaaaggtaaaatccagtgtaatgggagagagaatggaaataaaattagaaaaatcaaatggagtaaataatggcatgggagggcatctagctaaataatggacaccatcaaatatgattagctagtcagcatatcatttaatattattataattataaaaatagcatgagttcattataaacatttagacaattcacagatataaaataaaatacaaacttaaaaaaatttttccccactttccaatccttttctctactgtttgacatatgtctttccagatattttcccatatgcttctgcatacatgagtttctaacatttatttgctggatcatattgttttgtaactggctcctttcactcaactacatgtgatggacatctttccatattactgtatgtgcctcattcatgttaatgaccatataatatttcacagtaggaaagtactgtaatttatttaatattctcattgaagttggatatttggactttattcattttctaagaaagataattgagaacagagaccacatgtttaaatgtatacttaagaaagatagcaaaactattttatatatatggtatgtatacatgcagacagatgggaacatgttgtaaagcatgttgtaaaacatgttcccatctgtctgcatctatacatcccatatacatgaaattggtaacatgaaaatagaagggaataattgaaaagggagaaaatacacaagtaagtttgtctttacttaaataacttaagaagttttgcctaatcctgagttcataagaaatttacttcagattgccctggccagaacttccaacactatggtgaataggagcggtgagagagggcatcactgtcttgtgccagttttcaaagggaatgcttccagtttttgcccattcagtatgatattggctgtgggtttgttataaatagctcttattattttgagatacgttccatcaatatctagtttattgagaatttttagcatgaagggctgctgaattttgttgaaggccttttctgcatctattgagataatcaagtggtttttgtctttggttctgtttatgtgatggattacatttgttgatttgcatatgttgaaccagccttgcatcccagggattaagccaacttgatctcggtggataagttttttgatgtgctgttggattcggtttgccagtattttattgaggatatttgcatcaatgttcatcagggatattggtctacaattctctttatttgttgtgtctctaccgggctttggtatcaggatggtgctggcctcataaaatgagttagggaggattccctctttttctattgattggaatagtttcagaaggaatggtaccagctcctctttgtacctctggtagaatttggctgtgaatctgtctgatcctagacttttttttggttgggaagctgttaattactgcctcaatttcagagcctgttattggtcttttcagggattcaacttcttcctggtttagtctcgggagggtgtatgtgtcgaggaatttatctatttcttctagattttctagtttatttgtgtagaggtgtttatagcattctttgatggtagtttgtatttctgtgggatcagtggtcatatcccttttattatttttattacatctatttgattcttctctcttttcttcattattcttgctagcagtctatcaattttgttgatcttttcaaaaaaccagcttctgcattcattgattttttgaagtgttttttgtgtctctctctgcttcagttcagctctgatcttagttatttcttgccttctgctagcttttgtattcgtttgctcttgcttctctagttcatttaattgtgatattagggtgccaattttagacctttcctcctttctcttgtgggcatttagtgctataaagttctctctacacactgctttaaatgtgtcccagagattctggtatattgtgtctttgttctcattggtttcaaagaacatctttatttctgccttcatttcattatttacccagtagtcattcaggagcagtttgttcagtttccatgtagttgagcagttttgagtgagtttcttaatcctgagttctaacttgattgcactgtggtctgagagacagtttgttgtgatttctcttcttatacatttcctgaggagtgctttacttccagctatgtggtcaattttggaataagtgtaatgtggtgctgagaagaatgtatatgctgttgaattggggtggagagttcgtagatatctattaggtccgcttggggcagagctgagttcaagtcaaggatatccttgttaaccttctgtctcattgatctgtctaatattgaaagtggggtgttaaagtctcccactattattgagtgggagtctaagtctctttgtaggtttctaaggacttgctttatgaatctgggtgctcctgtattggatgcatgtatatttaggatagttagctcttcttgctgaattgatccctttaccattatgtaatggccttctttgtctcttttgatctttgttggtttaaagtctgttttatcagagactaggattgcaatccctgcttttttttgttttccatttgcttggtagatcttcctccctccctttattttgagcctatgtgcatctctgcacgtgagatgggtttcctgaatacagcacacagataggtcttgactctttatccaatttgccagtctgtgtctcttaattggggcacttaaagggtattcagttaggaaaagaggaagtcaaattttccctgtttgcagataacatgattgtatatttagaaaaccccatcgtctcagcccaaaatctccttaagctgataagcaacttcagcgaagtctcaggatacaaaatcaatgtgcaaaaatcataaacattcctatacaccaataacagacaaacagagagccaaatcatgagtgaactcccattcacaattgcttcaaagagaataaaatacctaggaatccaacttacaagggatctgaaggacctcttcaaggagaactacaaaccactgctcaacaaaataaaagaggacacaaacaaatggaagaacatttcatgctcatggacaggaagaatcaatatcatgaaaatagccacacttcccatggtaatttatagattcaatgccatccccatcaagctacctatgactttcttcacagaattggaaaaaactactttaaagttcctatggaaccataaaagagcctgtattgccaagacaatcctaagccaaaagaacaaagctggaggcctcatgctacctgacttcaaactatgctacaaggctacagtaaccaaaacagcatggtactgctaccaaaacagagatatagaccaatggaacagaacagagccctcagaaataacaccgcacatctacaaccatgtgatctttggcaaacttgacaaaaacaagcaatggggaaaggattccctatttaataaatggagctgggaaaattggctagttgtatgtagaaagctgaaactggatcccttccttacaccttatacaaaaattaattcaagatgtattgaagacttaaatgttagacctaaaaccataaaatccctagaagaaaacctaggcaataccattcaggacataggcatgggcaaggacttcatgactaaaacagcaaaagccaaagcaaaaaaagccaaaataggcaaatgggatctaattaaactaaagagcttctgcacagcaaaagaaactaccatcagagtgaacaggcaacctacagaatgggagaaaatttttgcaatctaccaatctggcaaagagctaatatccagaatctacaaagaacttagacacatttacaagaaaaaagcaaacaaccccatcataaagtgggcaaagaatatgaacagacacttctcaaaagaagacatttatgcagccaacagacacatgaaaaaatgctcattattactggccatcacagaaatgcaaatcaaaaccacaatgagataccatctcacaccagttagaatgatgatcattaaaaagtcaggaaacaacagatgctggagaggatgtggagaaataggaatgcttttacagtgctgctggaagtgtaaactagttcaaccattgtgggagacagtgtggcgattcctcagagatctagaactagaaacaccatttgaccctgtgatcccattactgggtatatacccaaaggattacaaatcatgctactataaagacacatgcacacgtatgtttattgcggcactattcacaatagcaaagacttggaaccaacccaaatgtccatcaatgatagagtggattaagaatatgtggcacatatacaccatggaatgctatgcagccataaaaacagatgagttcatgtcctttgtagggccatggatgaagctggaaaccatcattctgagcaaactatcacaaggacagagaagcaaacaccacatgttctcactcataggtgggaattgaagaatgagaacacttgtacacagggcggggaacatcacaaaccagggcctgtcatggggtggggggctaggggagggatagcgttaggagaaatacctaatgtaaatgacgagtttatgggtgcagcaaaccaacgtggcacatgtatacatatgtaacaaacctgcacgttgtgcacgtgtaccctagaacttaaaatataataataataaaaaaattacttcagaaattaaccttcccttgtgttggcaactttattttgaaaatcatttcttcaccataacattaaataggaaatatggaataagaaaagaaatcagttgctgagtgtcaagtacagagcagcaagagttttttttttgttgttttttaaactatttttcaacataaacaaaagtagagagaatagtataatgaatccttgtattcataaaaaatatagaggttagtttactttttagtatatactcaatcactgaaaacttttttactttcttaaaacagtgtatcaaagaatttttcacctatgttcacactgaagagaggcttctagatcaatttctttcagcaggcctaggcccttttcacaaggcaaagggaaaacacaaaagaagtagtgtgtagagctggaagggctttaagtaagtcccttctatggcctggcctgcttcttaagatgtgattatggtaacagatgtgatagccctgtggccagcttgaggcaaagatgggaagaaaaggaagaggagagaagtgaatgtaggtacagacagaagaaaaggaactggaggtagaagacgactgagaaaggaaaattgaattatatgtgaaataaaatagtagtaactattcagacaaagggcaaggattttagaactcaattccagatccctcacttgttacttctgtgtctgtgaatgtatctctcaaccttgctaaggctcagtttcatcatctgcaaaacagtgctagtgatacttacctggaagggcatctttgatattgtcaatattagtttataaaataatgtgtataaaacccttggcacatcattagtggtcaatacttggtaatacagatattattattactttcataatcttaaaatacctggttttaacttggattattgctttcatttctgaaattatgctttttttgagaagcaagtacaagacatgagcatgtggcttttcaacttgaaaatgagaaacgggaatatgaaagtagtctcaggtactgaaaatctgtcgtgtgggtgaaagatttgattttttttttcctttgggatcccaataggcagaaagttttaggaaaatacatttttatttaacataataaagacatttctaacaatgagaccagtctagaaattacaaagagctatctcacagaagtgtttgcaaggattattgcactagatcaggatttttcaatcatggcagtattgacatattggatcagacaattcttcgataggatgtgttgttctgtgtattataggatgttttgcagcatctttagccctgacccactagaagccaatagtatcccccactgtgacttccaaaagtgtctccaaatgtagccagatgccttttgaggggcaaaatcacctacagttgacaaccaccgcattagatcgatagttgtccaacatagcttccagtgctaaaggtcttcagcactttagaggccactgtgagaaaggagaatttaagcacaatagagaatttgagggatgggagtgcttatcttttgttctggggacaccgatcatgtcagtgagaacagctcacttccaaatggtctctgttatgaggattctgctaaagtactcatataaacatcatcatctaaaaacatattttgcttactcaacttgaatcctttttggaattccatgaaaattattttggttaccatgagctcctgaatactttcatgtcatgtagacctttgaaagagaatttgattacttttaaaattcagaattcttttttttcatattcactgtcatcaatgcccaaataacagtttggatatgaatcaaaaggaaaagtgggatagcagtataaaactctaacacgttcatcaataattaaaatgacatgaggatagcctcatgtacttgatatttttgtcatataaatgaaaggtttgttctttccccctgtggaatctcgaagtgtggaaataagaacagtacattgttcttggagaacaaatactggtttagtgaccactttgggaaataatgtgtttgggttggtgaaaaaagacaagagagcttttcctcacctcacggaagctccattagttatatgaggctctggagcctccctatgggttgcctcctacagcaaaggacatctcaccccgggccttcactcttgaggtggcccagggagccctcagtatgaaggctctgagtccattgcaggcttgtttcagaagattcaggttcagaagtgcaagagatgaagataaagaggttgggtgtgtacagtctatatccatcatagtttttcttttcttactttttcatttaagaaaaaaaattgtcttatttcttctggttctgtaagaatattttaccaaaatgacagagaggagaaaaaaggataattgtagtaaagcaggttattggagaccacttcttccattcttttaaagaaagattgttctctggaaattatcccaggtcgggagagggggcacaggaggaaggaaggaaggaaagaaggaaggaaggaaggaaggaaggagaaggggaaggggaaggggaaggggaagggaaaaggaaaaaggaaggagagaatgaaataaaatacatttttcaatggcctagtttggaaaatgctgattaatatgtattttaaagtgcatagtgcctactaatgtattaatggttttgaggagttctttaatatataatctcattaattttttttctttctttctttttttttttttttttgagacaaggtctgcctctgtcacccaggctgggcagcagtggtgtgatcatggctcactccaacttggacacctgggtttagcctcctgagtagttgggactacaggcacatggcaccatgcctggctaaactttttaaaaaattgtgtagagatagggcctcgctatgttgcccaggctaatctcaacctcctagcctcaaacaatactcctgcctcagcctcccaaagtgctgggattacaggcatgagccaccccatgccgccaatcccattaaattttgttcactcatttagttaatgctttctcattttcccacttttgggtctcaccctgggaaacaacctcattttcttccatgtattcacaccttaaactccacccattctctttgtctgggaactcttactcatccttcacatctcatcttcatatcacttctgctgaggagccttcactgacccttccctattagattaagtttcctgacctttccttttatgagcatcccatgtacactcttcaacaccagtcattaaattatttgtttaattaatatctgttctcctcatagaccataagctccatgagccctttgaaagatgaattcatagcacagtatgtggtgcataatcaatgcatatctgttgaaagagtaaaaaccacctaatatatagagttcaggacctagcttgagaaatgctttgtagacagagcctccttcccccatctctttatagcacagtcttccttagagggtgcaactacagaaaaggaaatgttggagggataaagaagaaaggagaaatatttatttccaaagtggctctcatttggagtagactgagtcagaatagagtatttaattaaagtctaatatttgagatcatggtgcttatttctctctaacaaaagaggaggggaaaatgtacctatggcaaaggtctttagaaagaaccaccaaagacaaatagacgcaatttgtggattatatctggtctatgatgaagtcatttttcacctcacctcccttattctcagcacaaataataacagaaaattacttgctcctaattctgtgcttatctgacaaatgccgtcaatatttcttggattcatctagcaccttgtaggctgaagtagaacttgactctacaaggttaggttttgcattcacattcattcatattttaaacatcagtttctgtatgttttacttatgctttattaaatctcaattataaatactaactgttttcttaaaaccactctatctcatagatattttaaattgttacaatagttggctttaaataaaattttaaggcaaagaaattatttttatcagaccatctgtttatcatgtaggcttaggaagtggtttatagcttccccagatttggggggttacaagctcgctcatttgtactatcccccaagggagtttttgttttcataagtggaaaataggcaaacttgctgctacctagaaatgaatttgagtagggcaaatatttctaagctaaattttacattatgctattatgctaatttacagtctcttcctgccatttccttctctgtccaattacttctatttggcacttagaaatgtaaaatgcatgctttcaaacattttcactgcatagttgtcttaagagttcccttgaagtaaaacaaagcaatttcccatatggtgattcccactaaacagtgagtatcacatctttgtcaaagataatagtacctactaattaagtgcctaagaggttctttcatagcttttgcaaatattatattatttaattcttattatattcctatgagacacgtattgttaactcggtgacacagaaaagaatgtggctcagagagactaaatagcatgcccaaagtcacacatttagttgaggtagaggtgagatacaaacacagacctgtctggctgaaggcatgttattaactgttctgcactgtctctctcctgccacactatccttccatgctgagggctttcatattgctaacactgctcttacttttggacatctatgttgctggagtcagaaaacaaaaataagtaaaattaccatttcgaactgaggtttattgaaagcacaaatatgtgttttctatagtaatgtgaaagctttcgattgtccatactactaagctcttctaatattgtgaagtggtgaaatttgaataaatccccctgtttttaaaaagtctaatacttattttcatatactgtgccagttagaaacaatcaaatcaataatatatacagctattacaaattcagtagtttgagttttagctcactttttaagatggagattaagcttttcatactgaaagtataacttcaaagtacaaaagacagggcacagaaatactattttggtcaaggtaaagctaagctttaagcacgaatttattaggagggcaaaggttggagttttgattatttaaaatgcttcactatttttcatacatgtcattgacttccctacacaagaaggatatcctgatttgatgggttttccaaggaaattgtgattgtttcttgctgtggtacacctatattttctcatggtaaaatctcacacacatgtttgctgacaagattgatggaaattataggaccttatgtagtatcagatcatggattttggaataccacagcttgggatggagacctgtatgctctacttcctagtattatgactgtggacatgaaaattaacataatcttttgtttacttctttataaaagtgcagttaatgatagcaacttctccatggagttactctgaatattaatccaaaacatataattaagtggtatgtgtggtgcttggaatatagtaaactctccataagtggatttagttatggttgtttcagatagtgactaagggaccaaagacatggattaaattaagattttttgcctcgttcttcagtatgtagtaactgactaagctttggccacagattggtgtagaaacagtcatttgaggggaactgatgacttatttgccttttatggtcttctagccttaaggatgaatgacgttttaggttaggtttccttgaaaacaggctggcaggcatattgcatgcagcagatttgttgggaaggatgcttaggacaacagtcaataacgattgactaaaaaggcaaggcagaacttgaactatgtgatacaggtccatagaggtctcagaagatctgacaggagctctgcagatgaaatgatagcttatagtgtcctgtcttgaagtcagggggccaaatctttgtaacccccaactgaccagtcattggatttgagatacctccatggtgaggcacttagacataggcaaggaagctttgttctgtggattcctggggcaggtctcagtggtgagccctcccaggcaaccttttcagaagctggaagaatggtgaatgagtgtgttgatcctggaagttgggcagaggttgggaagggaaagggtctgagcagtgcagcacagtgtccattaagtagcttttaaaaacatagatcgtttatgagataattctccatttttaaaactagaaattaaatttgaggtacatataaactctagtttatctatactaattgaactttaaaaatctgttgtccaaactacaaatttatttacatttgagaagtctaaagcatagactgttgaagtgaccaaagtaatcaaaataatacaatcaatagctggaacccatttgttgactcttctcctgctttacacctttattgatttaaaacctgtgtagaatgtaacgttttgttcttcaagtatgtaatggatgtctgcaagtattttccagctgtgctctgtgattaccaaatttaagactttctaccaaatcaaatcctttattaaggtgtgctctcacctaatttacctgtataaattagagatgattggaaaaagccctaacgtaagagagcaagaaacctagtgcttcctacaaaatgtagcatcttttcatatttagctgaggtagacattattttcatactaatttcatggattctcaattatggaaataatgcagaatctgccttttaaatagaagtaatgaatcgatgtttacatgaatacctctttattcttctgttattatttttattcaggaacaaactgtcacatgcgtccctgtgaagagaccaccaaacaggctttgtgtgagcaataaagctttttaatcacctgggtacaggcaggctgagtctgaaaagagagtcagtgaagggagacagggatggggccattttataggatttgtgtaggtaatggaaaattacagtcaaaggtggttgttctctggcgggcagggatgggggtcacaaggtgctcagtgggggagcttctgagccaggagaaggaatttcacaaggtaatatcatcagttaaagcaggaaccggccattttcacttagtctgtgactcttcagttacttcaggccatctggatgtatacatgcagtcttgggctgagaggcctgacattcctgtcttcttatattaataagaaaaataaaacaaaatagtggtaaagtgttggggtggcgaaaatttttgggggtggtatggagagataatcggcgatgtttctcagggctgcttcaagcaggattaggggtggcatgggaatctagagtgggagagattaagctgaaagaagattttgtggtaaggggtgatattgtgggattgttagaagaaacatttgtcgtataaaatgattggtgagggcctggatatggttttgtattaattgagaaactaaacagaagacacaaggtccaaataagagaaggagaaaaacaagtattaaaggactaagaattgggaggacccaggacatccaattagagagtgtccaagggggttcagcataattacttgcttggttggagagtttttggggctctatccttgagtttttttatgttgtcatacagcaggccagattgatttaggtaaaaacaacactcttcatttaaaaatagagtcctctttttttagcagtgagtaagtcgaggcctccacgattttggaggaaagagaaatgcaaagccagcaattgtttaagaaggattagaaatggctaggagagagtgagggagattgatggtgtggtggggatagttggggagaggtagagtgtggcataagaatgggaacaagaataacagtgcgtataaaagtaaagaataggacttcatcagggtgaaagttttggagggtaccctgtcagcaaagatcatctatcctctttaagagagaattaagggtggcagtttgaggtaaaaccaggagatatcagttatgatggtttgaaggaaaagtgtaaactggcagtgtaaacaagggcaggatatttatgagtagttgagaatgatgaataggagtttgactagacagaagatagtagggatgacaaatttttggggtgtggttcaagttgggctggtgtctagaatgagactggggcctaataaaaaggagcatccatacaggagctcaaataggctataccctgtagcatcctgaggacaggccagaattctgagaagggcaagtggtaaaagtattgtccattcctttttaagttggaggctgagcttgatgatttgtgtttttaaaagaccattagtccattttacctttcctgaagattgaggacagtaaggggtatgaaggttccactgaataccaagagcctgagaaactgcttgggtgatttgactaataaaggccggtccattattggactatgtagaggtgggaaggccaaaccaaggaattatgtctgacggaagggaagaaatgaccatggttaccttctcagaccctgtgggaaaggcctctatccatccaatgaaagtgtctacccagaccaagaggtattttagtttcctgactcgggtcatgtgagtaaagtcaatttgccagtcctggtcaggggcaaattctcgagcttgacttgtagggaagggagggggcctgaaaaatccctgaggagtagtggaatagcagatggaacactaagaattgatttccttgaggatagatttccatggtggaaagaaaatgagaggttttaagaggcaggctaccagcttgtaacctacatgaaagacgttatgaaatgacaacagaatagaatgagcctatgaggctggaaggagatccttggtccaagaacaatttgccttgtttgggaagagattgatagttggaagtttcagtgggggagtaggtgggagtgactgatgagaaggagaaaaacttccatgaggaacagaagttggaatgctagctgcttttttagctaccttaacagcataagcattaccctgagggatgggatctgatgccttttgatgacccttgcagtgaatgactccagcttcctttggaagtaaagtggccttgagaagtgtttttattaaagaggcattaatgatggaggaaccttgcatagtgaggaaacttatttctgcccatataacagcatggtggtgcaggatatggaaggcatatttagagtcagtataaatattgatgcatagtcactttgcaagagtgagggctccagttaaggtaatgagtttggcttgctgagaggtagtggaggggacagagcggtagcctcaaggatagatgtggaagatactatagcatagcctgcctttgctaatgagtggcaattaggcctggtggaactgccatcgataaaccaagtgtgatcagcgtgaggaagaggaaagaagaaaatatggggaaatggagtgaatgtcaggtggatcagagagatacagtcatgggggtcaggtgtggtatctgaaataatgcgggggccagcctaaaacagtaaggtcaagttgtttggacagaaaggctacagggtgcggtcccagctcttgtgtaagaattctgactgcacagccctgtactttggctgtgtgtaatgaaaaatggttgggatgagttagggagagctagtgtgggagcagctttagggatgttttttaaggaatggaaaggggagtggagaaaggatttaggatctatggggtcacctagatttgctttggtgagtttatataatggtttagtcaggatggtaaaagtaggtatccaaaggcagaagtagccaaccatgcctaggaaggaaaggagttgttgttttgtagaagtggttggggtttgggagattagccagacatgatcagctgggagagcatgtgtgttttcatgaagaattatgctgagataggtaatggatgaggaagaaatttaggcttgacggaagtaatgggggctgtccgtgaagccttgtggcagtacagcccaggtaatttgctgagcctgatgggtgtcagggtcagtccaagtgaaaacgaagagaggctgggatgaagggtgcaaaggaatagtaaagaaagcatgtttgagatccaaaacagaataatgggttgtagaggggttgtggagggaggtattgcagataggagagtatatgggtttggcaccatggggtggataggcaaaacaatttggttgataacgcacagatcctgaactaacttgtaagacttgtctggtttttggacaggtaaaatggggaattgtaaggagagtttataggctttaaaaggccatgctgtaacaggcgagtgattacaggccttaatccttttaaagcctgctgtgggatgggatattggtgttgagtgggttaaaggtgattaggttttaatgggatggtaaggggtgcatgatcagtccccaaggagggagtagagttatcctatacttgtggattaaggtggagagatacaaggggaggatgtaaaggaggctttgaactggagaaaagggtggcagtgaggtgtggctatagcctaggaatagtcagggaagcagataatttagtaaaaatgtctcatcctaataagggagctgggcaggtggggataacttaaaaggagtgcataaaagaatgttgtccaagttggcatcagagttggggagttttaagaggtttcgaagcctggctgtcaatacccacaacagttatggaggcaagggaaacatgcccttgaaaagaaggtaatgtggagtgggtagcctccgtattgattaagaaggggatggacttactttccactgtaagagttacccaaagtgtctgtgatggtccaggaggcttcagaggcgatcgggcagcattagtcttcagtcactaagccgagaagacctgggaaggagtcagtcagagggccttgggccagagttccaggggctctgggagtagctgctgggcaagttggacagtttgatttccaacggggtcccgcatagatgggacatggcttaggaggaatcctgggctgcaggcattccttggcccagtggccagatttctggcacttgaagcaagatcctgagggaggaggtccttaaggaatcccagaccgctgtggcttaggcgttttgaagttcttgtgtgctgcaaatgtggctggggtttctcttacagcacaggcaagtaattgcaactcctctgttattgaacatcttgaaggcgaggttgattaattcctgttgtggggtttcagggcccgattctaatttttgaagcttttttttaatgttaggagctgactgggtgataaaatgcatattgagaataagatgaccttctggcccctctgggtctagggcggtaaagggtctaagaattgtggccaaatgggccatgaactgggctgggtttttatatttgatgaaaaagagcctaaatgctaactgatttgggagaggttggataaagaaaaaggagcattaaccttgactatgcctttagctccagccacctttttaagaggaaattattgggcaggtgggggagggctagtcacagaacaaaactgtaagccagactgggtgtgaacaggggaggtgacagaagaattatagggtgggggagtggagtctgaggaagatttggagcctgattcagcctggcagggagtgacctgaggaggagcagtcttgggaggaggggagaagtcagatgggtcggtagaaaaggaagattgaaaagactcagcaacacttggggttgggactgaggggacaggtgggagggaaggaaggatttgggatgagtcgcattgggaacagagactagggagggaccaatgtgtaaaagaatgcctggatgtcaggcacctcagaccatttgcccattttacgacaaaaattatctagatcttgtacaatggagaaattgagagtgttttctggctatttggaactattgtcgagtttgtattggggtcaagtggcattgcagaagaaaataaggcatttaggttttaggtcaggtgtgagttgaagaggctttaagttcttggaacacaggccaagggagaagaaggaggaatgaagggtggaaggttgcccatagtgaagaaggcaagcccagagaaaagaaagggtagggacacggagagaaggggtggggggtacctgccctcccccctcaggaaagtggtacttgccactaaggtgaaggatcaaggcaggagtccctgcggtgatcagacacctctgaaacgtgggtgaataatcagacaggtgtccccacagtgattaaacaccaagggaaaactgtcttgccgagtccgtgactggtgccggagttttgggttcacggataaaatgcatctcttctgtctctaccagaaaaggaaaggaacagaaattaagagaagagagagacccaagggtggcaccaagattgaaaggagaaagaggttgaaggatagtgagagaggctggagaagagtaaaaagagcctgcttacccgatttaaaattggtgatgttccttgggctggttggtctgaggaccagaggttgtaggtggatctttctcatggagcaaagagcaggaggacaggggattgatctcccaagggaggtccccccgatccaaatcacagcaccaaatttcactcatgtcagcgtgaaaagaccaccaaacaggctttgcttaagctaagcaataaagctttttaatcacctgggtgcagatgggctgagtctgaaaagagagccaaggtagggagataggtttgggtccattttataggatttgtgtaggtaatggaaaattacagttaaagggggttgttctctggcaggcagggatgggggtcacaaagtgctcagtgggggagcttttgggccaggagaaggaatttcacaaggtaatgtcatcaaaggcaggaaccggccattttctcttcttttgtgactcttcagttacttcaggccatctggatgtatacgtgcaggcttgggctcggaggcctgacacaaacatgctttcctgacatctgtattctaacttgtgtgattcattgtttttaagcttgaataacctgatttcacatatttttccatgagtcagaggcatgtctagctgttagtttgttattgtctgtacttttacatagcatgcctgcactagccatcatttttctactttgtgtttttaatcttttaaccagtcactttgggaagagtttttccaggaatagtttttcccgttttcaaagaaaaccaggcaagaatggctatggatctcacaaagactggcaacattttgttgctattgtttatttaatttagtgggtttaaatgaaaccaggacatctgcagcagttttgatctctggtcttgctctcaactatttaaatcttaaaaattgttttgctctatgttttcataattttattgcttgtcaaaaatcagctgggatacatgataggttagcatggtgacaatgttatcttaaccatagatgaagcaaagtggtgaaaatttcctgagaagatgattaatgttcatgaaaaattaataggacatctgagtttcttgagatgtaaacatcatctaactgctctagtttggcttttttccaagggaaataaaaatattcccttagtgtctaataagagtctacatgataagtatgaactttagaaggttagtgtatttagggtaaatctattgaatattgagcttaatttattcaatccttatttttgggtgcctgtttttacctaagtaccaaaaggaaatgatcaatgaaagtttctttcctgactcacatcccttctagctactgctccctctctcagcaatccagttcctttcctctcattctcttaaatcaaccatcttttgattgttgatttaagcacactactaaaaatgtccaggttcagcagtgaccatgttattgttcagttctcactcttcaatgggtttgaccaataagcagctcttaatacagctgatcattcactttactgaaacacttttttccacttacctgtttttctccacattttctggctatttttactcagtctatttttgttgttccttatcatccccacaagctctaagtattacaacataccagtgttcatttcttcaacctctctttctctctagctgtacacatttctctggtagtctctctcatcttgttgatacatccatatgcttcatgtcccaagtttatattcctagcccagattttaactctgtaattcaggctcatatatccagaacatttaggcctttggcttttactttgattgataaaggagttgtgggagagtgtgaatggagaaatgacatgatatggcttacttttcaacaggatcactctggctgctgtgttaagagtagatgaggggaagcaagtgcagaaacagggggtccagttaggagctgttgcagtcatctagtcgaagtatgatgatgattttgaccagggtggtgatagtggaaatggtgagaagtggtcatattctgaatatattttaaagttagagttaacaaaatgtattccatggattgtatataatgtgaaaggaagtgaagtcaaggctgaccccagagtttttggtccgagcaactggaatttcattaactgagatagggaaggttggggttggagaggaggttctgatggaaatttgtgcaactccacttaggaagtgttattttgagatgacacttagagtgctttcattaaatatttattgagcaaatgactggcatctcagccctgccttccacgaccagttatttctatacatagaggctttgtgtttcacgtctccttgtctttgggtttgtggagtagtagttacatggctggtgatcagagcaaagtgaatctggggataaaattaccccatatacagacacaaacagatttttttttttttaatgatgagccccaactctaacttcctcctattacactgagacctgggtttttccagtgttgtgatcaaaagatgggcttacttctcaaggtaatctctgtttgaaggcaatgagactttggtttcatatgttttgtttagtcagttcctaaatggctacctcatccacttgtcacttttcaaaaatgtgttgacatctctttattattcttatcactccccatgttatttttgccattgtggcatctatttttatatctctaaattgttattttagtattctgtttgcctaagggacctgagataaatgcacacgttcaatccaagttaataaaaattccacttgcatattcttccagaatctttctttttaatattgaatatatttttcattcaaatatacaattaaacacttttttctttcatacaaatgcaaaagcattaaagttttaatttgtcaaaatgtttactgtcatgatgttgcattaattgtgggagattcggtgctccgcgtgatctcctctcagacatttagagcaatcttcacttgtgaaattgcatgagctcctagcataatagtctctggagtattttggacactaaataaatatttcttgagtgaataaataaattctcgaagagctgcccacctttgacgtttttattctcctatatttttataggaggttaattctcccatatttttcttcctatatttttctcctatatttttcttccagtatttactattccattgatattataatatttattcaactgataccttctatgtgtaaggtgctgtggaatatataatactgatttagaaatagttcttgatctcaagacatttacagtttattaatatagaaaaatcatgtaaaaataaagggctagactgtaataaggagcataagagtcgtactaataatttaagggttcaggggagtgagaattttcttggcaagaaaaattaggatatctttatgaaatgatggctttaagataagccttgaacagttactgggattcaacctaagaaatggaaaggaagtcactctaaatgagtaggctagcatgtgtgaagatgaagggacgagaaaatgtattggttgataagtattcgtttagctcaattagagtaaaaaaaggagaaacatggaatataaagccagaaagaatttgaaacagatgtgcttggccataggcaataggacagaaagaatatgggtggtttttcacagggtgacacaaaaggttaatccataggagattgctgtgatcagacattttctttgggaagcctgttggaaagaaatgaaaggtgattgaatgctggcaagagaaataagtggtatcagagagatttgagtctctgagaaggatgtaggttctatttccagatatatgggaattaggagaagatagttttggaagtattaataggataatagtaattttagatatagtaaatttagagtgaatttcaggtataaatgtctaacatgcagtagaaaatatgaaactaagaacttgggaagaaagggttaaaataaagacaacaaaaatgattaaagaacatcatattatgtgatcactttctcaggtttaacacatttagtttttgaaaagttgctattttggaatcatttttgatttttattaaaaggcgcttctttacaaacaaaaaatgcagcttgtaattttttatattgaataaattcatatttatttaaaaataatgtgcagttacatcatttttacatttaattcccaaacatatgacaagttacaaatatctttttatattttgtgggactgttataaaattattagtcatttgtgcacattaaaaacccaatgccatattgaagaaataattggaaggtaaaggttatattttctccaggatattaaaatacgtatttctccagatctgttgttacagtcagattgtcactttttatttttcttatccttagacttaggtgaatgtgtattctagaatttatattaaggtcgacatgatccaaactttatgtcaaaggaactagatagattcagcaacattttcatgtttacagttaaattaaaatttcaaaatacttaaaattattatcatagcaaaggcttgtgataaattttaaagcatagatgtgtatgaaatgattgtaagagttcttgttttctctgtcttcaattatacttcccaagttagtattcctaaaatttgattatataaatctcttcaatgagaaaaaaagcacaaatatctgtctttttattttttatgcgtgtatttatttatttattttgagacagaatctcactgtgtcgcccaggctggactgcagtggtgcgatctcagctcactgcaacctctgccgcctgaattcaagtgattctcctgcctcagcttcccaagtagctgggattacaggcacctgccatcatgcccagctaatttttgaattttttatttttattttttgagatggagtctcgctctgtcacccaggctggagtgcagtggcgtgatctcagctcactgcaacctccacctcctgggttcacaccattctcctgcctcagcctcccgagtatctgggaccacaggcacctaccaccatgcctggctaattttttgtatttttagtagagacagggtttcaccatcttggtcaggctggtcttgaactcatgaccttgtgatccacctgccccggcctcccaaagtgctaggattacaggcgtgagccactgcggccagccatgtttttattttaatattaatatgtgcttaactacacatattatactgtaactttttaactgaaaaattgccataagcatatcttttaattcatgttttaggagaacgatagagctgtagatatcaatacttgtattatttcttccctttgagatgttttctaaaacaaaaagacagtgagaaaacaatgaatcaccacaatgtgatctaggcaatattagtgaatctggatattttttatgcaaagatactaaaatgtgattctaagatcttcattcacgttttcaaaccacatatactgaattcattctttatgttattctgtgaagcctccttgcaaatatgaggttacatgcttaaagactgttaaagtctgtcttagtttggagaagtatcagtgacttataaagacttcatttccaagaggttgagagaaacaatattttgttttatccgttcaaaaccagattagcattcgaagatatattgataccttggactggtacttagaagggagaagtttacagtttcctatgagacccagtgagatattaaacattgtgtgtaattaccttttacagtatctgctttgaaataattgaatagagatatgaatatttggcaaaatatgtattttattttagaatgcattatgagattaactcaagccacatttgccctcaggcacacaaggacaaacattctttgccttccattctgatatcttcttggctataggtcatcttttcataacctgagatctagttcacagtgaaggacatccagtgacatgtggacaatcggattggtagctcagatctctgttgggtatcttgcgttctgagagctacaacttttattatacagagactctggtcagccttcagtagtatatagttaaatcgtgggtggtttttgcagataatattttatttggagatttactgatgacaaaactgtttgctttcagagttattaaaaatcacagtgtgggctgggtgtggtagctcatgcctgtaatctcagcagtttgggaggttgaggtggatggataatatgaggccaagagtttcagatcagcctgggcaacactgtgaaacccaaactctactaaaaacacaagaaaaatagctgggcatggtggcacatgcctgtaatcccagctgcttgggaagctgaagcaggagaatcgcttgaacctgggaggcagaggttgcattgagccgagatcgtgccactgcactccagcctgggtgacagagtaagactcaactatcaacaacaacaacaacaaaagttacaatgtaaataaaacaattaagtacagaatcacacttataaataaaataattttaataatacaaatatttaaacaatgttatttaaaaatatttcaattttaatattttatactactgttagcagtaaaaatcctataagaaacactgattgtaaagtagtagcttggacattccatggtacattaattccaaaccttggacatagattatgtgctttcagtttgttcataatttattatgaatcaatgacaaatacctacctttatatttagtgttttcactgatttttcaggctaccgttcctttttgcctaatgagttgttaacataagatatggtacttttatcttcatttatttctctccttatagcatccctacaagacctacattaactagtcagcacagtgagctctgaagtcttggacttgctttatgtaacccaatcgctaatcacagggcccttccactgccattttctttcacctgtgccataacttcagcccttatttccttttaattcatattgtggcataccaattctactaatgatcaacacatgccttttttcctcctatttcgtttgatttcttatgcaactctcacccattttatgtatctttactttaatagagacagtgacctgcaataattaagaattaagagacctggatccaaattttgtcttgtctttttattgggcaagtcaatattttaagccttaattactcaattttcttatctataaaagacaactctgtaaagttattgtagattttgaaaataaatcacttaacacttcccgtgacacatggtacttgataaaagctgggtagtcgcaggcagatggtcccttacccatagcccttagtttagatgcatttttagaattcagaatttatggactttaaaaggtatgcatatttcatatcgtacttaatatatccaacaggatgttagtcagcatctcaaacaagtggataattctgtaggacaatgcttatgtgtgaatttttacacagaaatattagcctcccattaattaaagtcaggtattgttaccaaatgagttatgaaaaaaccattattcaaattttggaatcgagggtaagtgagtaggaatccagaaaacaagaagaaatttttcatttttcttattgtaaactaaattttgttctttcattttgactacctggatgttttctaggtttcctaaatatgggaccataaagcactttttttacctacacttccacaactcatccctctccccagctaccctcaccactccagatgtcttctgagaattaagggagggaatgaaatagagttatttctgtaggagcataattgttgggcatggaaaattaatgtcacattaagaatttttttctccctggaatttgttagggtaagtatatattatctagggagaaaatgacacaaaaaagcattagtttttgtttcttcctttgtgatttaaaactggcttttcttatatatattttaacttagaagatgttttagcaagatttgtagttaaatgaaatacactagcaattttaacgtgtgtaatttattgttttacataagtatttttgggttttagagaaatgtagattgtcttactgacctgttgacattgatttttttttcttccactaataaggatctgtatagattttagtctgttccttcctgttatctattgatatgggggacttgctatcaggataaaagttgtaattgaattataatttcatattatgtaattattaatcacaattgattctagtatttttttttagtgtccaactgaaaccaaagcaacatttggggttcatcttaaaatagtaggagactggacaggtatgtagaacatacagttttaagatacattctttgaaaatagtggaatgtaataatttgaatgtgttttaatataactaccagcatgtatagagatgtgtatgtgtttcaagctgttctgggtttttttttgtttttttttttttttttttttgcttgtacagttttgacatctgtgttttctcttttaagatgcatttttgcaatcagaatacctttgatatcagtaattattaataatatattgttcagtgtgcttgcaaatcataagtttctacctacttgtcaggtgtgctggcaatagtgggaatgctgaaatgtgtttcttagaaaacatgagtcaaaataatcaacacctgatattgagatcacacaaatcttccagttcttgcatgacattttttgtggtgttccagtatatagggcaacttcacagtaactttggaatagatatttttcacagcaggcctgttggtgatactttacttgtcttcagtaaatactttttattacctgagagatgcattgtagtaagagctttgagtaaataaaagaaacattattctctcttatattaatatttccttgacccgccagagtaactgacaagtgagtactcagtaaatgttggcttgttagttggttggttatgttattgttacaggaaagaatgcagatataaacatgaatgcaaaagtaaatttaaatattcttatacttaggtgctaaacgaggagttggtaagtaaaatctgtagggaaccagaaaagtgtagattaaatgtggtctagggctgtaagagaagcttcacagaaaagacagaatttgaactgaagcttaggagtcaggcaaatgaagaaagatgtaggtaatttaagtgaaagtcacagtgttgtcaaaaatcaggaaaggcaatgattaactctctttggaaaggatgaatccaatcagtctttaatcaattaaacaaaagcaaagtcaatcaaacaaaatgaaacaaagacaaagtcaatcaaacaaaagcaaagattttgttctgggtagtagcacagaaaagccatttagggccagcttggtgaagattatgaatgcctcagcaaaatattagagtaaccaagggactttagggaatttttgaagcatttgaagcactatgatgaaaatggtattaattaagttgctagttggacagattaaaatcaagggaagacttgaaggtacttaaaggcagaggggaaggaggcagtggaggggtggggatggaaattggaagtaatggatttgtgaatacaagttaagaaggtagcattagaaggaagaacctaatatctctaaaaaccagggaaggataagatgttggataataagaaagatgtgttttgaaatgaggagaacaatagtttatataaggaggttatttcatagagttaaaaaaaataatattggtatgtataaaatgtaatgtctttagaaagggtagccagcttggaattggagacttaaaaaaaaggaaggaaatctgcaacataggatttaatgggcaaacatctaagtgaattaaaaagatctttgagcagtaataactcattcagagtcatgaaaaaccaggcttacatggataattttcagatggtagcattcaaaagagatcatggtcgtcctctgataggtatacactggtggagtatgaacatatgaataatcacaatatgcccaatataagttgatattatcacagtgttttttttttctactgttttggaaataaaaaataaggaaagttcttttctggtgagaatcccaatatagtaggaattaaattcagtcatgaatggtaaattgatagaattctatatctgaaagaaaacatgcaatgaaaacataatttaattcataagattaagcagaaactcctgatggtttattattagctattgttactgagttttttcacaaagttattttttattaccagtagctcattaaaataaatgatgtcttactattttaatcatctctattaggaacacttaatagtgttaattttattctccctttttaatgtattatgtcactgagagaaacaagatcattctattcagagttcagttctagtcagatgcttttcaattaatagaccttctttgttgttgacttgaaatatttgttgacttggaaaaaaatataagcagtcatgcagagaacacctaaatagtcatgtcattatctgacactttagttcaaagagatttagctgccttacaacaatgagattacaactattgaaggaaaagtaggagcattaccttcaaaatcaagaatcattggtttttattctaaaagaattgattaaaactcggtattaagagcagtaggtataggaaataccaaagagatacctaagaggttgaatatcaaaggtttatttttttaaaactgacttagagatatttaatatgactttttatttgctgaaatatgttctgcattggcagcatacagggactaaagagcaggtttaaaatagctccagaaatgatctctccaagactaatcaactatacctagctatagagtgctggaggagcaagggaagcagctatgcggcacaagacaaagaagcaccaagtctcatatttgttgtctagattttcattttcaccagacctctaattgcatctcctagatacgtggaagacctgttaaagtttagaagacccttaaaacattttagacatgattcagtgttttttcttgaaatgatgctagtacagtagatggagtggattacccaagtagatttctcttttaattgaatgaataccttattgctcttctagaagcagccattctttccagtttcaaacatatggtcagagattattgacttgattatcattttaagtgtacaaaaatgttttgttaatttcttcgttacatatgattagtattgattaatgtctgagataatgctatacccttgcttattttggtggtctaaatagccacttattccacaggtgtttgtgttgtgctacaacagaattaaatacataacatccacatgtaattaatgtaaactttctgccattgatcccttcagcagttaatgaattagcaataattgtgagtaaatattcaataaaggacttgtagcatgtatcacatgatgtttctatgaatcttgggtataaattcccatgttgtctactggaaaagttttctacagtgagaagatatggttatcttttaggattaaaaatgagaagacagggccatatattattgtggatttgcctcagtcacataatatattgacttctcacagtgcaagtaatcttaaatataggtttagttaaggactgggccacaaaagagttgataactctcttatttgtttctatatcactgtaggagccagtcgtgttataggctttattcagatttttcatgaaaagatttaaacagaacatgtgttacgtgtttaaagtattttttttttcatttttggaaactccttgtaagtcagattataaccacactaatttatattaatgttattactttattatgacaacatattttaggccaattacatcaaccaccttgcactagatatcactgtgaatggcttttggttgctgcaagaagccaataaataaataaacaaacaaacaaacaaacaaataaataaataaatcatatttggatatatggaatctcacagattttacataattcatattcatacaatgtaaactttaagcttataacaaatattcattatcaactgctatatacccaaaggagtgcctggaagtactctttttgttgttgctgttgccatgactagtgaattacaacgattagtcatttgtggaagataatatttaaactattaactttggctaataatcaaatgtatgttaaacagctactgtgttccagactgtttattagtcactggagatacagcattgagcaaaagtgacaaagtctccgctcttatagagattgtgttttggtccatggggagtttatcattttttttggagatgttttggtgtgactctatctcctgccacttagccatggtttatagattgtagtagcctcacctataccctatgtcctcccagcccctgtggatggtagtaattttcttccactctttgtattttttcaccatcctcaatttggcttctcacttcttccctcacctgagtcattagttccctctaatgaacttcttccacttaacttatgcagtcatgtttctgcctggatctgcactgttacacaaggttagaaaagctctctgaacagagccctgaataaagaggagaaatatataggggaattgcatttgcagcatacaaggactaaagaacaggtttaaaatagctccataaatgagttattttaaaaatatatatcttaaaaaagtttaagagataataaaagtaagagagtattttatatctataaaaatatatctttaaaaagtttaagaggcaataaagtaagagaggatgtggagttgttaagtatagaccagtctggcagtatgcttgggttacctcctagggcttgagagaagtgcttctcttcccacctccatagtcagtgaagtcatgtctgatagcttcccatcactcacagtgatagtagttattccacagaaattgaccaacatcattcccatggtgtgaatgtgtcccctgtaattcgtatattgaaatttaatcaccaatatgataatattaagaggtaggacttttaggtgatgattaaatcatgagaataaagccctcatggattagattagtgccttatgaaagggattgagggagttgattgactctcttctgctcttctaccatgtgtgttcctccccctttgctcttttgctcttctgttatgtaaggacacagcagtaaggcaccagcttagaagcggagagcagactttaccaggcatcaaagctgctggtgccttgatcttgtacttcccagcctttagaactgtgataaataaatttctgtggtttataaattaactaatttgtggtattttgttatagcagctctctaacaaagacaaccataaagtaggtcttatgtatttatctatcattagacctggctattaaacatttgccagaataccactggacaaattctaagaagtttgtatgtaaagtgaaataaagaaataagtcagcagctgaaaggaggaaataaggacgaagaagatataagttaaagatatatgattattttataataattataacaatatactaattatgttataatatatttatacacttatttgaatgatgagaatgaagtggagacaggaagttttatattgctggagagatttaggatatagttccaggagcaaatggaagatgtacaagtttctgggaagaaaacttgggaggctttctgggtcaaactgagtgttagagatatatagaacttgcctagagtgggggattattccacggagaaaaaatagcttgaatggctcagaagggtgaactagcttggaatgtcaggaaaatgtcatgctattgggaggcctggctggggtggcatccaaatattaggccaaggaagagcttgtagatcttgctatgaaacttggtcgtttcccaaaagatgctggtgaaatattgaggagttttaaacaggaactgaaatcaaatttgccctttatatgggtcaccctgccaatgttatatcaaatagaaaggaagaagactaggctggaggcaaacacatcacattaaagattttttagtgtcaagcaaatggaagactttatcttttgagttttgagaaaggagtgatctatgattgctgcaaaaagccaataaataaataaataaataagactgagcaatatcactgttagcctcataaaaatcatgtcattaggaagatgcaaaggaaaggtctggcgatggtacatattgctgcgaattactgagggcattggagaccagtaagtggagagagttagtgtacaaaaagaggcacatagcaaatgggcctattgctaaattcttcctgtttctacatttccccagaactatgagaatgattgatttttatactgatctggcttgtgattagcagcagaagatgaatggcaaatacagatgtaactacctgtgtatatatctagatggatctgtgtcaggatgaggattaacctattgtatcttaaagtatatatgctttgtataatgaaacactgtagttctggcctcttgtgagtctatgtggaaatcatttaggataatgatgaaacttaacatggcttatttactatcacaatataataaatcattcaatgaatgtgaactgggcataaattctacagcctcagaaatcaaggaaatttttttatcaggaaaatgagaggcacattatatgtgtactacaatttaagtgcccatccattctcaggaaagaagataaattgtttttcccttggtttctcattttatgaacgttaaatatatgctgtcatgttttttagtaggttacagctcacttaaaatactacagaaatataaaaattgcttagtaaataaagaattcaccagtcattaagttttattcgttccagccatttcacaaacccaaacataggagtaaataccaaatttttgttttctatccaattttcacaatgttctttttttttttttttttcttttcagtttttagagacaggtcttgctgtgtctcccaggctagagtgcagtgatatggtcatggctcactgcagccttgaccttccaggatctatggaaggatctatggatcctcacatgtcagcctcctgagtaactgggaccacaggctcagaccaccatgcctggctaatttttatattttttgtagaggcagggttttgccatgttgctcaggctaatcaaactcctgggctcgagcgatcagcccacctcggcctcccaaagtgctgtgactacaggagtgatctactgtgcctggccaaaatgttactttttagttttgaaaataaacaaatcatacaattactggacctggaagtagagttattgtggtgaagtggtttctttttatggattgttatatttttattagaattgttctgttcctaaaagttgcttagagtctctgttatccagtattttctacttgattttactatgtaacatggaagaaaataagaattatgagggattttcttggtaacataatttattaatcaatgtcaaaaacaccacataatgtactgaatggctaagaaggcatatgtcagtttgccaaatgagcctagcgttaatggactaagtaatttcaaaggaagcaaaaggacaagggttttgtgccattatcattattatcaggaacatttttaagtactcattttcttgatacacttgctaatcattttatgtatttgcttgttgtttttccctgatccatagtcttggtcttcggccaagacatcttctatttaagaacagagaagactcactacatggctgttttctattggctttaaaggcccatatattgcatggcattgattttatttgctcggttctttagatttgaacttcataaaacataaaagaaaatctcctgtttttttttttttttttttttttgtgggcgtggtcttggtcttggataaaatggcctgttttttcttgaatacacatctaagatatattcagtttctgcagaagccaggaactgaattagtatggagctgagtcttgatcagtctgaggtgtttcttttgatgaaagccaacattgttaaaaaaaaatgcatttgatgtgacaaatgaaaatataacatttttcttaaaaggtggattgtagaaagcttagtagcaataatgtgtttacccaacaatgtctgttatttgccttcactttctttgaaactgtttttttttttcccaccctctttcattttttgttatagtttagcctctgtggcaataaacgccaatttatattttataagaaatccagttctaggcattgattcattgatgtatttaggggccaagaagtctgtctgtagttctttcaaaaactgcttttgatttttttaaaataaagtgttaaacaaataagaagcaaaataatgagtatcacagaaatagacttttatcactctgctccccctggaaataaaaggatccattaaatattcttcctttgtgtaatactgcattgtctaccttcagaccttacagtatttaaaagtaccagatgttgaggcatgcagatggcatatgaccctgctaagctttctcttatcctgtaatccttaggcaagaagaaagtaaaaggagggaggggagaaaagggagtactgtatattctcgggagagaataaggcagtatgacggcagtggaaagaaccctggactgtgagtgtttttgttttgtttttgtcttttctttaagtatctttgcctctttctagccatgtgaccttgagacaatcagccagctggttggtttttagtttccttgtctacagcataccaaattgagggagttgtttcctaatttctcagttcattattgctgtaaagtggtataattattttgaaagaaataaattctaagatacagataattcaattccacataatgtgtgaatgatagtagataaattttggtatagttcagaaaatattacaggaatactatggagaatacatgtcaagtagaggatttttatgttgcttattttgttttcctattagtgttcttattcattcattagctctggttgtacatacatctcatcttctgaaaattacatgtatgggtttagggatttttttccccttatgtaagacagtataaagttctgttttttatattgctttgacatggccttaatatttgcaaaaaagatagttttatataaccagagcatgcgagtgatagggttttttcttctggaattgtaaatcattttattttcttctagaattataaatcattttcatttgaatcctagaatcttatgacacaagatttgtctacatatgtaatatatataggcaaatatatatgtgtgtgtatatatgtatgtgtgtatgtaaacatatatatacacacaaacagagagagagaaagagagagagagacagggtctcactctgtcacctaggctggtgtgcagtagcataatcatagctcactgcagcctcaaaatcctgggcttgagcaatcctcttgtctcagcttcccaagtagtgaggactacaggtgtataccaccacatctggctaattttttaaactttgttgaagagcaagggtcttgctgtgttgcccaggctggtctcaaatccctggcctcaagctttcaaatattgggaatgtagccatgagccaccacacctggcctgcctatatctttaataagttgcaacttgatttcctggtttatgtaaagtagtactaatttgagagcctctcatgtttatctgaaaccaatagtttaaatagcaacattgttactattatattgttactattcagttaccatgtattactatgcattaccatgtattattattgagttaccatggtaataaaggacattcgcttgatttaaacaaacttttcagtagggagatgtatgctccatatctttctagttggtatggatatactctaagtttgccctttaattcttctttttagaaggaatttgtttttctaagattaatatgcatacttctaaggaaaataaataccaaattttgacaaaccattaatttctttaaatccctagaaataatgtgcttctttccctttttaaataattttgtaattacattctaaattcttttcaagtagctataatggcattgaagttcttttgttgtcctggcattttttgtgtgtgcttaataaacagagctgccttggtgataataatttgttttgttcacagtatgtgacaaatgataggtactcaataaaagtttgttagatgagtgaaaaagtgaataaaacatgctttaactgatgaaattctgattatccaaaatattgattttattttcaattctaaattttctatcattatagattattgatatatatgtaacagagcaaaaatattcaccttatctagtaccacggctcaaaaggacttcctttgttggtttgttttattttttataaaacctctccgcttcttttgctttttgttaccagcatatccaggctaagttgactgttctattccaaactctcagagcatacctttagcacttatttacttgtagcgtttgtatcttttgataaataatttagaatgcaattacaaaattatttaaaaaaggaaagaagcacattatttagacctcttctctgctagacctttagcccatgaagaacctcagttggtgcctgacttacagtgcatgctcagaaatgttactgagaaattacttattttaggtgttcacattttgtgtctacatatttaaatagtaattcctacatgttgtgagaaaactcatttgtaccttctatttcaagcatcatgtgtgtgtgtttgtgtgtattgtgtgtctgcattggtgtggtgttttccttggtaggtggaggaggggataatactccaagatctataatatggggagtatgaatgaatgacaactactcttgaagatatgttcatgtgtggtagtgtgcacatccatgccctacatctactctttaaatatatatctatatatacacacacacacgtatagatagatgattgatagattacttttagataaatactgaaaactaaaattcaaacaaatctaaagattaaaaattcaaacaagatatagataaaataaaaagctattatatatgatcaggagccaacaggcaatacttaactgatagagtcaaggtgggcatgatcaagatactggacagcatggctggaagagtaatcaaaatggattgacagtgaccgcctgcacatgccacagaggtgttatttatgtaacatctggaaggttctggaaaaagagaaatgatttattgctgatctttattctacttaaacacatgcacatgcatcacaccccacagtagccgagaacttggtagaagttctcagtacaaagtggagatctatgaagcacctgtgtttcaggttggattagctagaaggtgtgtgtgtgtgtgtgtgtgtgtgtctgtgtctgtgtgtaatgtaaaatgcttattagggatcaatacccatgacaggaaagagaacaaagagggtttgggggaaggaagaatttgaaacaaggcaggttcaacaaagcccagccaaattggtgggaagaactagagcaaatattgcccatcagagttgcctgtgtagtgctgaaatatccttgccttgttcagtcaatggatgtgagctgctctgtgagaggtatttgctttgcatctgaggccgaccctgatggaagtgacagatggagattgcctgccaactgcgctctccacagctgggcaacaagttcttcactgaagaggcacttgggggatacttctctgtatcaactacatgacccctagcttattttcttattaatatttaattaaaaataaaatctcatgtgaatatgaaatggagcaggatgctaggacagcaggaataaaccagaatagtctcagtcaaacaaagacatgtggccccactccctttcagtgactttaattaagatttcttttcattccttaagcaaatattcttttttgttttgttttgtttcaatagtttttggggtacaggtagattttggttccatgtataaattctttagtggtgatttttgagattttagtgcacccatcacccaagcaatgtacactgtacccaatatgtagttttttatccctcacccgacttctaacattcccgctccagagttcttaaaattcattatatctttcttatgtctttgagtcctcaaaggttagcttagctctcacttataagtgagaacacaggatatttagttttccattcctgagttacttcacttacaataatggcctccagctccatccaagttgctgcaaaagacattattttgttcctttttatggctgagtagtattccatgttgtatgtataccacattttctttatctacttgttagttgatgggtgcttaggttggttccatatctttattgttgtgaattgtgctgctgtaaacatgcatgtgcctgtgtctttttcatgtaatgacttcttttcctttgggtagatacctagtagtgagattgctggactgaatggttgttttactttaagttctttaaggaatctccatgtattgtacatagtcatttgcactaatttacattcccatcagcagtgtaaaagtgttccctttttaccacatccataccaacatctattgtttttagactttttaattgtggccattcttgcagtagtaaggtagcatctcatcgtgattttaatttgcatttccctgatgattagtgatgttggccattttttcatgtttgttagctgttgtatgtcttcttttgagaaatgtctgctcaagtcctttgtccactttttgatgggattatttgtttttttcttgttgatttgttttaattccttgtagattctggaaactagtcctttgtcagatgcaaagtttgagaatataagcaaatattttttaagcaactcaaagttaaaaggtggcttaaagatcactgaactcatctgactcagttgtgagttcagaaaaggaattaagaatagaggcagactaaggtcaagaactcaggctctctgacaaccagttgagtgttgtttcttttattttttctttttccaagagaatttcttttctgctttatttaggtataattgacaagtaaaattatgtattttcagggagtacatatctctggtatacatatgcattgtgaagtgattaccacactcaagctaattaacgtatttatcacctcaaatagttacctttgttgtgtgtggtaagaatacttaagatctacttggcaacggtgtcttttctcttatgacctgttgctgctaaatactgcagactgtatgagtgaagaaagatttgtcctttggtatctcctttctcatgtatactctctgataatatttcctgcattaagaagtaatcctcagcctatattgccaaaacaatgtgaaataatatcgatattatggtgcattcatcttattgaccctttttggggtatgaagtactgtctgattccttgcaatataacttctaatactattaataggttacaatatactaggtgttcttaaaactaaggtaaagactttaatagagtcttaatctttaatgtcccttaaggatttcgttttgatgccatttaaaaaaaattaaaactggcaaattagtataatgtgagcattaacagaaagataaaaaaattaacctattaataaaaatgcaaagaacttctgttcaagtaccttttgtttagggaaatactgtctctcttagaaatattttatatgacttcttttattaccctgaaaaatctaatactcaaaacagttaaaatattcatttttatagaggaggttatagagaggcagttagggaagggggattacctgaaggaaaacaatgatttggaattggcaaaacctgtctgggtctctctagcaaacaataggtctttcttaggttgctgttaaaaaaactaattatgtgacagtgatcacatctctagatgcaaaggatctttaggttatacaagaatagcattaatcattgttacttttgttttttatatatttttttctttcttttttttgtagtggtaagaggttttattttcttctcatcccaggaataggtttgcatactgctaagttgcagtgagctgagatcatgccactgcactccatccagggtgacagagcaagactccatctcaaaaaaaaaaaaaaaaaaatgcctactgctttttattgttatgtaaatccttattgcatttggtatattctgcatattggggtggattagagattggtcattttctgcaaaggagaaaatgaaacatcttggtcacaaaaagatgtagaaaaagtttcaattagaaattgaaagaggattttaattttctcatctttgttttcaaataattaagtatattgtgtcacagttgattaaccagagaatgcaaattaatataattgtgtgcagtatgtcatccaggtctaagggcctcataatctttttgttgattgaatgggagaaagaaagagtggatgaaggtctacaaaagcttgtgttaattaagatatatctcctactggtagaaaatcacgttcagacattatcacatcgttagtcagctcatcacggtatcacttcgcagaaaatcctgtttttttttttccagtggctttaatgaatttcttctaagaagtcctgtgaaaggactgagctgtagtatttggataactgtgccattttcttaagaaacagtttgagcctgctgagaaagtaggtcatctggtttgacattttcctgcaaaagaagtagcattaatatatctttttttttttttacttaacaaataaaacatcaaattattttggccttttcctcataatcaaatagacaacaggatgctaattaaataactgataggcaaaaatctgtgagactaaagaactaaataattataaataatttttccatttacttgaacttttctaaggataattgttatcatttatctatttttataaagaaataaatgaataatcagtatgcctttataagataaaattaattgttcacatttaagaatttattaatataatgataaaaataaaatttttttaaaagacatgcttttaaagttctgtgtttactttctgtttatgtatatatgaaccctttcttttcttttcttttcttttttttttttttttttttgagattaagttatactcttcttgcccaggctggagtgtaatggcatgatctcagctcactgcaacctctgcctcctgggttcaagtgattctcctgcctcagcctcctgagtagctgggattacaggcacccaccactatgcccgactaattttttgtatttttagtagagacagggtttcaccatgttggtcaggctggtctcaaactcctgaactcaggtgatccacatgcctcagcctcccaaagtgctgggattatgggtgtgagccaccatgccctgcctatgaacctttttgacaaccacgatagctattcaagatgtttgcttggtattctttgtatttctgataatctgattaaaggatgttccaaatataggaacattagttataggtttccttatagctttataagtgatgtcttttttgctgcttttgctgtatgtgtgtgtgtgtgtatgcacacacacgtgtgcatctgtgtatgtgtttttagtcctgtcaatatgtcatctgcagagattcttttctctggaattattgtcatatgtcctttatggttatgtaaaaagagaaacacttattgctgcgaaaaggatgtattatattatagttgtgtgcattaagaattccgaattttgtttgcttttaacaagtttgggagaaattcactaaactttaatttatactattacctttcaaggaatatcataacacatatagctgtttgatttaacggttctttacctgatatgtaaagttcttgtttgctgttgggttttggcttgatttttcaagactcattttaggaaaaggctaagtgggaaaaaaattgaaaagatagagcattacacattactcatttaatgagtactgcataaattggcaagtagactgaaaaccaagggttatttatcatcagaaagtttactagtcatttgattgaaagaaatgttaattttgtaaattaaacagagtaatatcagcccaaatatcagccaataatataatatttaaaaatgtgaactaaaagagtataattcgagaaaaacacagagtatttttttggatttctagacttcagagtgtaagcacatctgtgtttggatctcattagttcctcctcatctatgttgtaagaaatgtcagaattttgagagaaaaaaaaacagtagaagccagttatgtatctctgattcagtatgttttaataaatatgaagataaaatatacattctgcttctcaggaagcactggccactttgtgactgccgtattccaaataatttaacatctagttattcataaactaggaaatggcaattgtcatcaagtgtatattttcatcattttgtggaaatgctcaccttcagttagtgaaggatttactgcagctggggagtgttagctttgcatactatctaagcctgactgtgcgaccgtatcaagacaggagtatgggtccacttgctgttcatggttgatatatgaccgtttggtctctgctgggagttattatgattaaccttaacaaacagttttctccagtaaaaatagatgttggaaatatttcttcaacaaatatttatccagcaccttaattatgtatcagataatgttctgtatcttggtggcacaatactcatctactagaagaagaaagagggatagagagataaatacatataacaataaaacatagtgtgataaactctgtgaaggtggaagcacaagttgtactgggagtgtacagtaggtccagcctattccaaattgggcaggaggagagaacaaaaaagtaatggagggatcaaggaagcctttccataggtatgactctagaggtaatgcatacctattcctgaaaatgtgcatactctatgccatgcagatagctatgcaacgtaagtatttccaaggtaacatctaggattttttcctttgtcctttttttttcccccttcctcttcccctccccctcctattttctctcttttcttcattatgaattcatatgcactgaagtttactaaatcaattcttagctcatgatatgcagtcattattggtcttttcctggccgtcattcacttatttatttattcatttatgatattacaattaatacatatgaaacaccaacaattacttacatttacccttttgcttctctcctatttcatccccctacctttcctaaaagatagtcattattctgaattgtgcatgtccttcctttttaattggtttgctttatttcatatatatcatacttaaataatacattgcttagttttttaactcaataaaaattatgttctgttacatgcaatctgcggagattttatttcactcaacattatattaatatgattcattaggtttttatttataaataaaatcattcagtttcacttcagttagtacttcattttgtttgcgaataagcacaaatgtccattctctcatgtcaatgagcaactgagctgcttccatttatgttgttctatgagtggtgctactgtgaacatgctcatacttgctgtctaagacacatgtgaaagtttctgcagggtgtgtccctgagaatggaaatattgggccacagactttgcaaaagtaaaacttaaatgataatgccaaattgtcttcaatagctattgtaccaatttggactcccaccagcagtacataagagcttaggttgatcaacatcctctccaacacttggtcttgggagactaatttctgtcaattgaatgctacatgatgtaaatgctagttaatggtgtctggttttgattcacattgcatgggttactaaagagactgtgcatctcttagtatgtttattggtcatgtatattttctctaacctttcaatgataagatttgatcataaagatatatgttaccattaaggaaaaaaaatatatttttatatttatatatgagaaatatctatatgtagaaatgtatatattatgtatatttataggataaatataactatttcaaatattaatccaggcttaattttatatatttaaaatatatatatgaatatatattatttatatatttatacctatttatccttaatggctacatatatatttatgattaaaatattataatccatctatatatatatacacacacacacatacatacactatgtatatattagtaatacataaaatggtgggtaaatttctaataaaggatggatatacagtcaaaatgtctaacaaaataaaccaataggaaatacttccattttgaaattattttcatgacttttatcttttcacagcttgatgtttatttttcttttgacagaacgatttcgagatttactactgcctccatctagtcaagactccgaaattctgcccttcattcaatctagaaattatcccaagtaagcaaaaggagttcactgggttttgatgaggcaatgggcatagtgctgggagagatttgggcaggcaaaaacaaaatgtaatctttcttaagatttctgaaaatcttgaataacttaccctaactaactaagacatcttctgcaatataatgtctcaggctccttgcagctgggtcatagaagaaatacttacttgtaattgcaacccagctttgactgaggagctgccgcacagtgcagacaacatgctgtgtgcatctgtgtctggttctttttgcttgatgtcatatcaacagggacagtattttgtcagtgatgcctcatctggttttctatttactgtcctttaaatgcaaggattcatttatattgtagcaagtcattttcaaaatagccgtgggctagatatgatttttgacaatctctacatattcttatgatttttgacaatctctacatattcttatttatcgtattgaaaacaggggaaatgaaatcttctgacgctttgttatgtgaagcagacctttccttctcatagatgccccaagcgtatgtccttgttgaaggaatatgccttcatcttcccgaaggttaaggaaataccacgactcttataacacatctccttccctaaagactgacgcatgctgaatcttgatcattcctgtggcatcttggggcctcctctatgagtgtttaactctctttaattgttagtgtgcaacaggctaaagaataaataaactaatatctaaaatagaaaagaaaggccatcaacttaaaggaatagaatttggtttatacatatttcatctaatcactatgccaaattctttcatcgctttgagagttttttcaagtattcataaactttgctttccggggaaattattttccctctaatacttagctttgataatactcacttaattatgatcacaaaaataaatgcagaatcctaattatactgcttgtgcattgtttcaaattttaatccaggcttaatttttagcaataaacttgcaatcccctgataacacacacaaagacatacatgtgcctatacagccttgaatgcatactttgctctatacgtacatgttgaccaggagcatgaatgtgcctaaaaggattggtgcacgcctatttgtatttttacttacagtggctgttggcagaggctgatgatgcctgcttttctgcctcttaggcttacagtttgcctaatgcctttgcttgaagagggtagtcatagtagtttctcaggtggttatctatttgcagctacaggaatacctcagagatattgtgggtttgattctaggccactgcaataaagtcaatactgcaataaagctgtcacacttttttttaagtttctcactgcatataaaagtaattttaacagtattctgtagtcttttaagtgtgcagtagcctagatatgtctagaaatactatgtacatcccttaattaaaatatactttattgttaaaaatgctaacaatcatctaagccttcagcaagtcataaactttttgctggtagaggatctttcctcgatgttgatggttgctgactgattaggaaggtggttgttaaaggtaggggcacctgcggcaatttcttagcataaaaccatgaagtttgctgcatcagttggctcttccttttacaaaagatttctctgtagcatgtgatgctgtttgatagcattttacccacagcttaacttctctaaaaattgtactcaatcctctcaaaccctgctgttgctttatcaagtaaattgtcatttcagcattttcatagcttctttaccaggagtagattttatctcaaaaaaactactttcttcctgtaatcccagcactttgggaagccgaggcaggtggatcgcctgagggcaggagtttgagaccagcttggccaacatggtgaaacccatctctactaaaaatacaaaaattagccagctgtggtggcacacgcctgtatttccagctacttgggaggctgaggcaggagaattgcttgaaccgaggaggtggaggttgcagtgagctgagattgtgccactgcgctccagcctgggcaacagagtgaaactcgatctccaaaaacaaaacaaaacaaaaaatgacaaacagacaacaaaaccaaaactactttacttgctcatccatagtaagcaacttttcatttattaacattatatcatgagattgcagcagttcaatcatatattcaggctccacttgtaattctagttctctatttatactatgtttgtagttacttcctcctctgaagtcatggacgcctgaaagttatccatgagggctcaaatcacttcttccaaactcctattaatgttgatattatgacttcctcccatgaatcatgaatgttcttaatagcatctagaaggtgaataattttcaggatgtttttaaatttacattgcccagatctaccagaagcatcactgtctatggtagctatagccttatgaaaagtatttcttaaataataacaattgaaagtcagaatttctctttgatccatggattgcaaaatggatgtaatgttagcaggcctgcaaacaacattcatctccttgtacatctacatcatagctgttggttgactaggtgcattgtcaatgagcagtaattttaaaaatttatttgtataaatttttgtggtacgtatgtaattttgatacatggatagattgtgtagtagccaagtcagggcttttagggtatccatcaccagaataacatacattgtatgcaataagtaatttctcattattcacccacttcctagcccccctgcaacctttcaagtctccactgtctatcattccatactctacatccatgtgtacacatcatctagctcccacttttaagtgagaacatgaagtatttaactttctgtgtctgagttatttcattcagggtaatggtctccagttttatccatattgctgcaaaagtcattattttgttcttttttgttcctgaacagtatttgattatgtgtatatgcagtattttctttatccagtcatccattgatggacacttaggttgaatccatttcattgttattgttctggtgtgagctttgcttactgcctatgtgagtagtaacactttggatagaatcttctttttttttctctggtgggcttaaaatattcagtaaaccatgctatctataaacagatgtgttttcgtctggactttgttcttttatttatagagtgaaaacagagtagatttagcataattcttacgggccttaagtttttcagaatggtaaatgagcattggcttcaacttaaagtgaccagctacattagtccatagacaagagttagtctatcctttgaagctttgaagacaggcattgactgctcttttccagctgtgaataccgtagatggcgtctaccacttgatggctgtcttgtctacattgaaaatctgttgtttagtgtagtcaccttcatctattatgtcagctagatcttctggataatatactgcagcttctccatcagcacttgctgctttgctttgaacttttatattatagagatggcttcttttcttaaacctcatgaaccacttcttctagcttcagacttttcttctgcagcttccacatctctgtcagccttcatggaatagaagagagttaaggccttgttctggattagtctttggctgaagagaatgttgtgttgtggctggtttaatcatccagaccactaaaactttctccatatcagcaataaggctgttttgctttcttattattcatatgttcactgaagtagcactttaaattttcttcagaaactttttcccttgcattagcaatttggctcactgtttggcgcaagaagcctaactttatgcctatctcagctttcaacatgccttcctcactaagtttaatcgtgtccaatttttgattgaagtaagagacatgcaactctcctttcacttgaaacttagaggccattttagagttgttaattggcctaaattcaatattgttttgtctcagggaagaggatggtcccaggtaagggaataagaaggagaaatggttggtagttgcagtcagaacacacacatttattcatcattgcagataactgaaagtcaaagaatttgtagctttgtaacataaaaaaaattctgtaaagttgaaaggtgagtcaaacaattagaatgtatttcattcacaaccactgctgtatgtatctacattgatattttttcctcatttttctgattgaaatatgttttaagacctaaaatatgggttacaaagcaacttccttgccctataaagttataccatatcacagagtatttacagatcattgcataaccaacatagatcataacatcactaacatggactcattgtgcactggttagtgtgagctgtggtagtttggatttggacttgggtttctatttagtcaacatagtgtccctataatctttaacttcctgttaccaagagacatctaacaaataatgaaatatggaaatgtatgtcctttatataggtgaaaaatattcatgaagagaactgactagttctgaaatgtatatgtgtatgtatgtatatgtttaaaggaaaggcatttaaaaaataactcctgcaatggtgcttgggaacactcttctaaaatacaagaatgttcattaatcaatttttacatttgtgagctcttatttgacccactgccaaagccagggcatccattctcatcaggatgtaattgtagacattgctccatgaaaattctcagaacatgaataggtgtgacagttgtcagaaagagacagatgagtggaaaggaataaaaaaagaatgtgcatctaatacaaaatgcatattgttgatttataggttggaggaaacaaatggagataaaaaacaagttttattgctaataaactctgaaggatttaggttcataacatgtagactagagagtagttataatatatttttatccttgtaaatacagcttggacatgtaaaatggttaagtacatctggtataattttatccacaaattacttgcaaccattttggcaattaaaccagcaaaacatgacccattggctctggaagttttaaccacaatgtaggtaaaaatattgtgaaaatacaagaataaactgtttctacttggttctcataaagatcaagttctctgagcttcctaatatcggaactgtttagagagaggaatatcatttatgacaaattttagagctgttcttttttgacttggtttgctgccaaagaacaaccttgattgtttggacaataaaagcaatgtcctacctcaatctcatttctaatgggctacgtaaaaatgacttcaaatggtgattttgggtaatacccttaaactgcaaagcctcagatgacctttccatagtctgttctccagcttatcctcctttctctttcctagccaagttttgagttcttcttcaagatatcatctatctttaataatttctgttcaatctgcatgtctgtaatgtacttgtcatctgatcctgagccaagttattttattttattttattttattttattttattttattttttagacagagtctcgctctgttgcctaggctggcgtgcagtggtgcaatttcggctcactgcaagctctgcctcccgggttcaagcaattcttctgcctcagcctcctgagtagaagggtttacaggtgctcgccaccatgccgggctaatttttgtatttttaatagagacaaagtttcaccatagtgaccaggctggtctcaaactcctgacctggtgatctacccgtcttggtctcccaaaatgctgggattacaggtgtgagccactgtacctggcccaagttatttttgtttataatagtaacacataatgagcactacacatccaggaattgtgctttatatgcattattaatttaattcttactattcctctataagttaggtagtactgtttccctaattttacagataagaggactgagattcaaagaggtaaatgccctacccaaagtcacatggcagagctgggtctccaatccagatttgtttggcccctcaaattatacttaacttagaagtggtgggtcattgagggattactcccaggtggctgaaaactgtgtatgtgtggagcacgtgtgtgcatgcatgtgcaagcacacatacacttggagtcgaggtataaggagaaatgtggacagggcctagaataccctttgtcttctgaggcaaggtctcactctgtcacccacgctgtagtgcagtggtgccagcacagcccactgcagcctcaacatcttgggcttaagtgaacctcctgccttggcctccagtgtagctgggaccacaggtgtgtgccaccaggcctggcatatatatatatatatagttttttttttagagacataggtttttttttgtttttttgagatggagtcttactctgttacccaggttggagtgcaatggtacaatctctgctcactgcagcttctgcctcccagattcaagaagttttcgtgcctcagcctcccaagtagctgggcttacaggcatgtgctaccatgcccagctaatttttgcgtttttagtagagacaaggtttcaccatattggccaggctagtcttgaactcctgattctggtgatccgcctgccttgacctcccaaagtggggattacaggcatgagccaccacacctgaccagagacataggtcttatcactttgttatcacaggcctggtctttgttgcacaggctgctcttgaactcctagcctcgagcaatcatcccacctcagcctcccaaaatattgggattacagatatgagccactgcatctggcctggactgccacttaaatgaccttggactttgttgtaaagacaatgaagacccatgaaaggattttaagccaaggagaaagataattagacttacatttttatagatttctcatgaaactagagaggtacatgagctaccgcatggggccagcacactagctacttggcaatttcatattcaggcaagaaatgataatggtttgtactgtggtaatagtaatatggaagatcagatagatgtctaagggtgttcggaggcataattaacagaatgtgatgactattatgcaagaaggagaggaggagagagagggagaaggaaagagctttgggtggcttcaagctttttcccttgagtcacattctggtttaagtcctcatgattgagggagagtggcaatctgagcatctttatgttgactttttgttctgtattacaaatgatgataatggagataccttccttctaatgttgctttgaggaatgcccaatgcatgacacaattctttcttgtaagtctttgtgatatttaaataaaattataaaaagcacctggcctcttgcaaaagtgaattctcatcaccattctcgttgtcagctctgttctgccatttctcaaagcaattgcttgcctcagggcagggggaaaggctctgccatgtgggctgcttttatatcttcaatccattctaaatcctgtcagaagagatacattgtcctgtctggtagaggtggctctgggtgatatgctctgcttagattagtcaggaaggagccctttcccttgtgtgtctgcatatttgtggtagtggttattccggtacagtttctacaagcacagtaattcataagattttccacagtatacataatgtctttcattaaagaattactgtctttcatcttctaatccttaaatttaggctttcttttatatagtatgtgaaattcgaatacctggatggcaagagatctaaaaggtagtattctgactagagtgtggaatgtagttataagaatgcctaatgctactgatgtttgcaaaactacgcaagtaggatgtctgaaggacgctggtctatcagcaggtagtggatcccaacccctgggctgggattcacaaggctaaaccctgtcatcaggactgtaaaactgaggcactgcttaaattgtaaagattttggctcagagatctaagtcaagaagctgtgttagcgcaagactaatgagcaagcaataaacaagccttagtgctgactgagagcacaactcattcccgactcagataagaattggttgaaggatagggccaagccgagtctatagctggaggttaggtggctaaaatttcagaacaagttggggatgtagccactttctggagatagattaagcacaggtaattctccatctttctttctttgttaccccatcctgcattcagctgccatacatcttttcagactctttagtttttatgtttgagggatttttgttgtttatttggggtttttttttttatttttaggcagaaattgtcagtcgacaaagtagcctaaagtccttcctttcttaaaaatcttatattaaatgtatccattcataatggttattggagcataattttgttagcatgattattttatggggactccttgccaaagaacttttatccttacagactttaaattaattaatttgtaaggccttgactgaatcattcagaattccaagagataaacatcaaattggttttttttcaaaccatgttccttttaacatgagattgcattagataataattacaaattattgtaagtgggcttgagttcttgatttcgctctcagcttgaacattactggtacatggaaatgctgctgatttttgtgcattgactttgtatactgaaactactgaagtcatttatcagttctcttggcagagtgggtttttctaggtatagaagcaaatcatcagcaaagagagatagtatgactttgtttcttatttggatgcctttcctttctttctcctacttgattgctctggctaggacttccagtgctatgttgaataagagtggtgagagtgggcatccttgtcttgttctggttctcaaaggaaacacatccaccttttgccaattcaggatcatgttggttgtgggtttgtcatagatggctcttattattttgaggtatgttccttatatgtgtagtttattgagggtttttaccataaagggatgttggattttatcaaaaactttttctgcatctattgagatgaaaataggttatttgtttttatttatgtttacatgcaaaaacagaaaactaaacattgggtacacgtagacatgaagatggaaacaatagacactggggaatacaagatgtgggagggaaaggtgcagggattgaaaaaattacctacctgtattgaatgctgctgtacactgtagagtacagtattggttgtttaagctcatggtcatgtgtctggctggaagctgtggcagctgcccagcatcatgagagaatattgtaccaaatactactggtacaggaaaaggtcaaaaatcaaaattttaagtacagtctctattgaatacatattgctttcactccatcataaagtcaaaaacatttaaattgaaccatcctaagttggggaccctctgtaaaatcaccacctgtaccagctcactcctgatcctccttacctgctctatcagcaacatcagtagctcctgggggaatggtgaaaactacaaatgctcagacttctgagtcagcaagtcttggggtagggcctagcattctgtgttttaagaagccctacaggaaattctgatacacagtaaaatttgaaagctatcaagggagaaccatcatgggctttttaaactcattccttttgtttattgtttctattgatatgattatctcctgagactagaatggtctaaaactgccataccatcctctcctgaggaatagtttatcacactcacttttttcctacatgaagagagaattgttagatgataattgtcctggaagctttttttgtttttacctttatataatacccctcaccaaaataactggtaattgtaaagattattatctgattattaacaaactaagctttggagttagactcagaatgaatttagtaaaagtcatccccccttaatataagtgtgaccttaagaaaattatttaacctttctgagttttagttcccaatgcaacaaaatgggcattatactttcctatgaaagttgttgtgtggattaacagtgaaggtatacatagaacattcagtaccaaccttggattaaatgttcggtgaagagtatccattgttaatatagcttattttaggtttctgaggtaagagtctcaggcatgtcttgaaaaagaaaaaatttttggacactgagttttactctgtcacccaggcaggagtgcagtggtgtgatcatagctcactgcagtctcaacctcctggactcaagccatcctcctgcctcagcctccctagtacctgggattacaagcatgtgccaccgtgcccagctaatacttaagacaagggtctcattttgttgctcaggctgggcccaaaattctggccctaagccatcctcctgcctcagcctccctaagtgctgggattacaggtgtgagccactgcaccagacccttgaaattttttattaattaaaagaactgtttaaagtgacagatgatcagagaagattttaaaaggcaaatatttttcaaaaatttacacttatatgaacattaaatgttgtaaattacaaacctttacttttaataataatataatatttattatattattcttaaatatctaatatttatcaggttcttactatgttcaggcaccatgttaaaagctttaacaagtatattcacattcagccacataaaacagaaatgtagcttgaaactcattaaccttaataaaagatttaaatcagtttttttaaatgtaaataaattctactttcaaaggaaaaacttaaatgtcaaaaaatgtttatatacttttgagtgggtcagggaggaagatatctcttattcttagaattatcttagatacacaatccttcataaaggatcttttcattagttatcaacagaaatttaaaaatatatgaagttgatttcatctctactatgttatagcaagactttaaagagttgcctttaatttctacaatctggttacatatattatgataatagcaacataacattcttttaaagaacatgtactatgatagggagaaagtcactgctcataagtgaaacgcagtgtatttcacacatattaatcagattaaatatgtaaaaaaagtggtttaagtagtttccgtttccatctccctcaaaaaagtagatgtcatgaagtaatcaaatactagtaattttatcttcttattttttccaagaaaagcaaaattttctctctcctggtacaaaaaaaaaaaaatcaaatgaaaaacaactgattctctaagggccttgaaatcaaattcccacctacatttcccagctcatactggacttagcccatttcttgcatcaatactgggcctcccagaaggcctgtcagtatactgtaggcactcattgataccgttaataaaatgtatttctgatatttgtgtggccctctacaattcttagcacactttttttctgtagcatcccaacttattgacccttttatagatgaaagaaatccagtttagagaggaaaagttatttgtctggaatcccagccttagtaaatgactagaacgctgagttctagtcgtcctgtccaaagttatttcaaaacaccaaagagtagctttgtggggagtggggagggtgtgtgtgtgggtgtgtagctcagaaagcagacaagtaggaaggagggggcagtggccaaaatatagtcacacagccaaaacagatgcagggagtctgagaaatgtagtattttggctggactttttgcttccctgaataaaattaattgtctgttactaagaaagaatgggaggatgaatattatatgaacaattagcatttctattgcagttaagaaggatttctctatgctctctctctctctctgtctcacacacacacacttgaatatataaacatgagcagagtaattagagctgcagagcttcctttgtgattgtcctttacagctaaagaactatcagtttgtaagtaaagttttatacttatgaacaaccagggcaagaggagggacagtgttagattcttttccttactcctgctatttttctgttcacatagtaaatgtttaaataagtatttccagtactgatctagccattgaaaaaatgtttattgaatttagacacagtaaagcaattgttactttaatttagtcatatatagtctaatatatgactatattagacatatagtctaatatgatcagagctttaacttgtccttagctacctggcatgatcatatttacattaccctatacttttaattaatggtttcctcaaaaaagacacacttagaaacagacgtatttattttaatcttgacacttcataagcaacatttgctactcctttaggctaatcactatgagaaaccatgaaataaggcctgacccatcacaaaatctagagattgcattcagcatgtttgctatatggtacagaaaattaatttcacttattttcatttttttcccacctttttctgactgctctacaggctgtatattgatggtccttttggaagtccatttgaggaatcactgaactatgaggtcagcctctgcgtggctggaggcattggagtaactccatttgcatcaatactcaacaccctgttgtatgtcattttgatctattttgttaatccaaatagagaactgccaatatttctgatatctctctttttagtataaaataattccttattgaattattctacttgttgatcaaggacctccatttcctgattggtgaggggaataattcagtgattctcaacatgtggtctgtggctgctagcatattctcttgtagaaagatgtcatatcacagttatgcactcctctgtccttttcctctgttaaaagtcattcgcctccatccttcattttctatgtcctcatcagcggtaagtggttctactcattcattcagtcaacaaatatttttgaacacccatgtgccaataggtcttacaggtattgggaagacagcaatgaatgaaaacagagtccctgcccttaaaaaacttacattcaaatggggcaagtaaaaaagaaagcaatgagaaatgtaaataaaattatttcagaaaatattagaattatgacaaaaggtagacattaatggatatggaaataaagggctgggtttattgttgaagtatggtcaggcttttctgagatgacaactgaacacatcattccttcatttattacttagcaaatttacaacagactaaagaaagtaacttcaaaggtgaaattgtggccgggcacattggctcacacctgtaatcccagcactgtgggaggccgaggtgggtggatcgcttgaggccaggagttcaagaccagcctggccaacatggtgaaaccctgtctctactaacaatataaaaatcaaccaggcgtggttttgcatgcctgtaatcccagctactccagaggctgaggcatgagaatctcttgaacctgggaggtgggggttgcagtgaggggagatggcgccactgcactccagtctcggtgacagagcgagactctgccaaaaaaaaaaaaaaaaaaggtgaaattgtctgaccaggaaatactaaactaaaacttattttagtttcaggattataagcaaaagttaattgattgatattcttatgaaaacacaaagcaaaatgaaagtagaaagttattctcaaatctattccatttactattttttttgcagaaccaaaaaagcaataataaatttaagtgatgtgtttgaatgatattttatttcagttttaaatactagatgtaaatttggtactttctggcggttcttacaaaaatgatcatgctctaagccagaaatagtttgtttctgacaacacattacaagttatttggacacctaatgttatgaaaaaggaagaaaattttcttaacctcaagcctactttataaatggggatccagacttggaattatgagttgctggaatgcattacatcatacatgattgtgaaatctctttctttaatgatttttaagaggggataaacaaccaagtttctggaatggttttggctcattttgccaaaaagccagggcaagactgaatgacctttggagccctactcagtctgtgatagaattcactgaaagttgaaaacttgttttttttctgagatgcagagcccaatattattctggtccagttcagttatggccttcaactggaaatggatgatatgcatacttgtgaatattattcacacttaaattcatttaacatttaacacttaaacacctaaattcatgaagtatgtcgtatccttgagtcagtatattgcatattaaattcatttaggtctcgtgctatcagacgctagaatgtaaatgactgatttttctgttggtttctattggatatttctattggttgcttactaatgaaaaggaaactttaaaaaatatacgaattctttaatatttgtgtttgccatcctaatcactatcatgttattttcattttaaagggatgactggaaaccatacaagcttagaagactatactttatttgggtatgcagagatatccagtccttccgttggtttgcagatttactctgtatgttgcataacaaggtaacattagggttggttctagttttgcaatttttcaaattaaaaatgttatagcttttatattacaaaagcaataaatgcttgccatagaataaaccatagaaattatgcagataagtagcaaggaaagaaataagtctcttaaacataaaaaatcagagataatatctgttagcaattagacacacatcttttcagatatggatatttgtgagtatgcatatatatctaatatattttaacatggaaacattcatttctatgttttaacatagggtgtttcacatagaaatgtatgcatatggctaaaggtgatgagggaagacaatggagggaaataccagaaggctcctgctgtaacaccttccatcctctgttctgatagcacttacccttgattgccatctttaatactgcaaatcaccagactttttggtatactatacaaatctcaacaatcccaaattttgtgttttattttttgcagagataaagcaggaatcttttcctatcctacgtgtaacatttgacctatttatctttattcacactatacaagtgatacacatatgtatccttgctacaaatatttcaaacaattctgataaagtaaaatcctctcttactaccttccctacctaatctatgtaaacagaggtaactcttaagtgttctataaattatatcatactatttatattgtttatgcaaattcctttattaattgattactgtgtcttgactattttttggtattagtgcatctagaactacttcactgtttttccctgtgccaacagttagagatgatagacccaccagattcttttagagtatttcattgtatagatttatctagtttactgaacaattctctaatgttagatacttttttattacaaagaatgctgaaatggatatcattatatatacctctttgtgcatgcattcactcattcagtcagtcattctatcattcagtgtatatttattaactgcttactatcaatctgaaactattctaggatctgaaaactcatcaggtggcaaaataaaaccaagtttctgatctcatgtggtttacattctaagggggcaagatagacaacaaccaataaatacatccagcatcaggttctgagattcaggttaggacaaagaaggaagggaaagtaggagtaaagcagcgtaaacagtagagagtgtgttaatttatattgcatgttcaagaacaaccatcaaacaaaatgctataatgccatttgagcagacttgactgaagtgaatgagcagactagacacatattttggagaaaaaaaatcaaggtagagaaacctaacttcataggcaagggctctgaggcagcagtatgcttggtgtcctgaaagaagagaaaggagatctgtgtggatgaagcagagtaagcaagagaaagaatagtaggacaggcaattagagaggtagtgtctgtgcttttctgggaagaggtggattacgtaagtcctccagactttatgcaaaataagtaaataaaaataaatgaaaacattggttctaggtatgtacctagaagaattaaaagcaggcaattggacagatatttgtatgccaatgcccatagaagcattattcacaatagccaaaggatggaaacaacccaaatattcatcaatagttgaatgaacaaattatgatatacacatacaatgcataactattcagccttaaaaaggaaggaaattatgacacatagtacatggatgaactttgaagatataatgctaaataaatatgccagacacgaaagcaaaaatatattatgctgtcacttataggaggtccctagagtagtttcatttgcagaggcaggaagtagaatagtctctacatatgcatccttgctaaaaatatttcaaacaattcagatacagtaaaatcctctcaggttgccaaagccttcggggagggggaagtgaggggttgttgttccatatttttttctagactatttatttttgcaggtatatttttgcctcgtgcatttttgtacaagagaaaccagagcccattattgaataagcggaaggaaggaacaggaaaaagtgtctatttgttttgttttatatttgctagcatgcataaattaaatcactattgtctttttttctcaagaaaatcatgttcttgatgagtaaactggtacaattttgagactcttaaggaataaaataaggagtatttcagaaggactaatatttgtacagcattcagcatgctaaattttgtatctataaagataacagaaaattattccctaccactaccaccatcagaactaattaataccaagaggccagattattaacgttagaatctgttatatatatttctgtgtatgtatgtgtgtgtgtattcattttcttatagatattgactatgataagctaggttgtgttaaattctagaatcaagtatgttagaataggagaaaatctgagtatacccacagaattgtaataagtctattcctttttctgtcctctcagttttggcaagagaacagacctgactatgtcaacatccagctgtacctcagtcaaacagatgggatacaggtatgtggttgatgttatcgtaaattaaacaagcctcttgataatagatttactgtaggagctgtggtggaagaaaattcctgcaggtggttcgaacagaagtttcctagaggaaagcctcctttggaatatgtccaggaaagtcatagcttgtccttgaagtcaaccacattatgccttccatttgtccttctcacagggagcttttgagtctgcccctcccctcttcactatcgcctcaagttcttctaaaattcagactacacatgaacagccttatgatttctttttattgagggaatgttttatgtggagagagaagatgagttcgtatacagttaagcttatttctagacaaagaaaactaaaaaataatgatagccatcatgcattatttatttactgttctaggaactatgctaataatttcacatatattagtttatgtaattaaaacagagtcaagcagtaaatgttattcccattttgcaagtgatgaaactaatatttgaagacaacattgaagagctggactggtgtataaatctaggcatgaatgcattcacaaattttattttagtactttttgtcatacattttcacaatacttggaatacaacatttgaatgttttcagttacctcaaaactaatctaactctaagttttccagtcgtatttctaccctacttggtatgtaaatagtatttcattttaccagtctcacgaagtaagtcaatatcacttttcctcctggtattgcgataattaaggtatgaagcataatttgcatctggttctcagtttgcctgcctgggactcagatacttcctcctttctccgcagttcactctgactcttcacattgatttagatctaatgctctgttaattgcaaacaggagcctgttcacagccatttgttgatagacccaattttggagttttgctgtcttgagctgtcttgtctaggattatttccccaaatttacgatgacaatttgtagtattttacttatataatgagccaaatatgacaactgtatttgtggtgccaaaatacttcaatgttgaagtctatgtgctgagcctttttgagattgaccaattagaattcattctttgtcttacactgcagttctttaaagatgaaacaactaactgaagtctaagaaaattagccatttgtcagaatggcattcaaggagattagttctaacaattgattcatttaaaaatcaaatttttctacctttttaccagaatagattttgtttgtttgtttaaaaacaaacaaatggaattcaaggagataatgaattttaaaagaaagaagaaaggaaatgatattttgaaataattgtacgtgataggttgccatttgatacttacattctttatatcacagcaatttggtgggaagccgcagcaccagcagaaatgatgttagagaactggtttacttaactaaatatcgaataatgtagtgctttctttttggcagaagataattggagaaaaatatcatgcactgaattcaagactgtttataggacgtcctcggtggaaacttttgtttgatgaaatagcaaaatataacagagggtaagtactatacctcaaaaatttgatatgtggctaataaaataattaaaatattttcaaataattacatgaagtttgaaaatgaattggcaatgagtttaccaatgacaaattcactgaaacactctttcactatcaaaggaagaagtaaggcaggtatcgtcctacatttttgtaattccaaataattaaagtttggcttagaaatagtctacagtgtatttatgagctaaactctcctatctgattataaatttgtataggcctatattaaaaatgggtattcgctcccacagcatatatcaggtgatcctaggaaaagttttcaaaatcatgtttccaaacaaagaattttacaattagttctaacaatgaattcatttaaaaatcacattttttgtacctttttttaccagaatgaatgttttttgtttgtttttcaaaaaactctctgcattgtaatatgcagtctttaaacctagaatatttccaaaaatattatttagaaactataattttataaagaatcttgttcttatggactacgtgtctatgatctgaagaaattactaagaaggaaagcttccatttcagggcacagaccagccagcccatttgtcttttgtaaatttatcatagtgcagagcactgatctataagaattctaagaagattttgaaaactatataaccactcacgtatttttaggtttacatctaaatagtttcatcataagtttacacagttgtaaaagatgtgatttctaacatattgcagatattgacattttgtaattaacataatttctttaaacatatccactggaatataaatacagctagatgatactgtcatttattacaaaaatacataaactcttcttttagcagttggatgttttacatcattctttttctttcatttaagttgtatttctgtcccattaacccatataattttattaaaattcaatttatttttacatttgaactaatcatatttttattgctaacctaatcctaatcatacttctgcaaaaagaatgaacataaattaaatatttcattttaaaattgcctgtaatcataagactctagtgttaatttttacttctggcttgagttatcatttcaattactttatatagttgaacacttcataatttttaaaatatatttttataaacatcaaaaggatatttgattataaatgtacaggccagcttattaaatggatattttttaaaaaatccaatttaggaaatcatggatgaatattatttattgaagaaatcactgattcaagatgatccctatctctaccttcaaagattttgttttagaagttacagaatggaggctgggaagcaaaatttatgaaggaataacgttacccatgtgattcagattacagtcatgtttaaaacacttttgtagtattacccttcccttgatgaagtagttttgggatgaagatgtaagcatgatttacaaagcagaacttttttgtaatattcagagttgaaatttagaaaaaaatgatttcaacccacttttggctatcttcctttcccatctttctccagtatcacccatcttagatgtgataatcttgtcatactcatctgtctcttgctatgcattgcagacatgttcctctttagtgccatttactgacttctgacaagaatttttttgttgattttcactgtatattgctgaaaactgatagttctttggctgaattcagaaaccaaatccctaaagagcagattatttacagggaaatagattgaggctgttggttcctacagttagttctcaagaagtctcatttgttaggctgtttgtgttttagagcgatttgtgtgtgtgtgtatatatttggtagtttgttctttttctggaaacaatggaaaactggtttaagaagagcaaatgtgcaccatctgctgttgacattttgtacaacactttgactttgtgtattggttctcaggcaggtgcctgaaatgtgtttacattttctgaaggatttttatgtagcatacttaggaaaagaatggatcaacattcttcaggtctcattaactggacaaaggcactgtgtaaatggatggtttcatttacaatgtagcattttgattaacctcatgcacacaaattgctgaaaacatatagagataacagtagggaagacaggcatataagttaagattttaaaatatcatgggttgggcaacagtttttatctttcagaaagtgattacttattaaaccagtaggcattaggttagtatactatgtagaatacaaatttaaattgcattaaacccttctggcccagaggtaatgactggtaactcttcgttatgtattcttacagaagcttttgtaagtttgtgtgagagtgtgtatgtgtacttatgaaagtatatgtaaacatatgtttgtatgtgtgtgtgtgtgatatatatttaaaatcaaaaccttagttttttaacaaaaattgaatctatgacaagtaattcttcagcttactttgttgtttttgttgttttatttttttcttggctttgctaggaagaacgagctaactttttaatgatgtgcttcttttgatcatggacaatttctgtataattgtacctcaaagtattctagagtatgaataacatgactcctactaccctaattctttatatttagataacttatatttctttacagttaaaaatagtgctgtggtaattatctttgtacatactttctcatgtgagagtattgcagtagattaagatctttgagttggaattgctggctcaacaggtatacacatttaggtactgctctacaaaaactaaaagtcagaattaatttactttccacatgtgtgtgacagtcattcctttcttttgttgctttttttaaattcagaaattgaattatatgatggtattatatgatcatggaaagtgaaggagctttgggagtcaacctgccttcatttttattttacaaatgaagaagctaggacctcaaaatataatgatttatcaaaagccatggttaatgagccagaatgcagatatgaacacaagtctcctgactgcaagttcattgtgctttacagcagggcatagtcagcttgtcacagataaagagtggcaatcttattttaccatgttccccttagatgggaggtagggaggtgctgcaagaaattcccatgtttactatgaatgctgtagcagaatgttaactgtaacactaaaagaattaataactaattattttgaaatagagatattctaaatattacattgtaaaccatttagtatttaataaactattagaaaattatttattatatctaacccaaacttggtttcctattgtttgtaattaaaatgtatatcctgttttgagctgtgaagtttattcatgatgcaaagagagaaagaaaatttgaactttgtttggctttttgagtagagaattactactctgggattgggtgaaatctttgagattatatctttattttactgccttgtagtgttttcaaacaatacaatttaagaataactaggtttagtctctcacatttactcctgtgaccctgagtcaagtgacttctcctggatctgtaatacaacgagtgaataagctctccggggtgattaagttctcattatgtaagatcctgcgtttacaaatctacatgaaaaagcaagtatgaacatttatagaactagtttctaatgtctacccccaaaccacattttcttagtacccgaatctacctccactcattccatcaaaggtctagtagacaggtctccagataattgttggattgcagcattctaatgcaaatttagtacaaatgaattgcaaagattccttgtagaattcgaaaaagaaaaaaaaaaaagtaagatttcattaagttagtgagagtgacattagggaatcctcaaatcgcacacacacggagaggatatcagagagttaagctagttaataattgcaaaagaaaatgttaaagaaacacaaaaatcataacatcctgtgtgatttaaaaataatgatttttattattatttattttataattaatacttgattttattatcaagtatttaacaagggcctttaggaaatctgaaagacttgccaaactaactctataattgccctgtcaaagccaagcaagaaaataatggtatcttattgccatcatatggcgttgacagaaagtttatacaaagaaataaaatgactcaattctcttttcattttaatggaagctacattatgtttcaatagtaatttaaattttattaagtataacatcatttattttcatatatttttatttcttttgctcactttgggtttaattagctttttttaatttttactagtttcttaaaatggaaacataggtcattgatttcagactgtttttcttaataaaagtgtttaatgctatacattttcctctaaacaccacttttgctaaaacttatacattttgatttgttttcattttcatctcgttcaaatattttttattttttatgttttttctttgacccatgggttattttaaaatgttgtctaatttccaaaaatgaggaaattttccagatatctttttgttcttaatttctagttcaattgggatttgatctaaaaatgaactccttgtgattctaatcccttaaaatgtattgacacctgttttattgcccaggatatgttcaatcttggtgaatgttccatatgcacttaaaaagaatttgtattccattattgttagatagaacattctacaaatgccaattagttccaataggttgatagtgatgttcaagttttcaatatgcttactgaatttctgtctgcttgtattaattactcagagtattgaaataattaactataattatgaatttatctgtctttacagttccatcagtgtttgctttatgttgaagctttttattttcagtgtttaaatcatttacatttaatttaatgaaaatacagttggctttaaatctagcagttcaccattgctttgtacttatctatttgttctttctttgttttattttctttttttaccttgatttgggttgaatttttttttataattccacttttttctctaatgttagccatgcctctgtatttttttttttttttctttttagtaattgctttaggttgttggttcctgaactggattccttggaccagcatcaattggaatcttgttagaaaagcaaattcttgagccctatccaagatctgccaaatcagaaactagggatggggagacctagctatttgtgttctatgaagtctctaaaatgattctgatgaagccaaaattaaagaaacattgttctaagtttacagtatacatcattagcttatcacagcctattttattttttatgtttatgtttatgtttattttttagagacagagtattgctctgttgctcaggccagagtgcagtgacatgatctagactcactgcaaccttgaattcctgggctcaagagctcttcccacctcagtttcctgagtagctggaactacagttgcataccaccatgcttagctaatttttaaaattttttgtaggaatgggatctcactctgttggccaggctggtactttgaataatattgtaacacttcatgtacttccatttcttccatccgttttgctatttttgcattcatcttacatatacatatgttatagttctcattattagtattttttgttttagacatctagcatatattaaaaatattagaaattagacaaaataaatattttatatttactgacagattttactattttggtgtccttctttcctttggttgattcaaatttctatctaattttattttcctacttcttgagtagttttctttagtgtcctttatagtgctggtttgctgacaattctttcaggttttgtttgtatacagtttttattccatcttcatttctgaaaaaatatttttgtttggcatcaaatttgcttgttatataatagttgatgtcttgatttatattttagtactttgaagatatcacttcattgccttctgacttgcatagtttatgacaaaaagttcactttcattcttatatttcattcttatattttctgttgatgatttgtaatgtgtcttttctcccagtctgtttggttttatgtttttctttttgtcactcgtttttagtattttattatcaattgcctaggtatagtttcctttgtgtttattctccttgagatttaatgagatcttttattttttttttttcttctcccttggtcttctctcatgttggactgcagttacatgtatttttgactagttgttttgactagttggtattgtcccacaggccacttatgctctgttctttttttttttttttttttcagtttttttctctgtgggcttcaatttggataatttctaatgctttttcttcaagtttactttttcttcagcaatgcctgttcttttattaactcatctagtatatttatcatttcaaatattgcattccatctctagaatttatgtttgggccttaaaaaatattccatttatcatctcatcatgattatgcttttctttaaatatatgaagcctgtgtatcatcactgcttcaatgaccacgtctgtcatctctatcattctgagcctgtttctgttgaatgccctttctccttgtattagtttgctagggctaccatagcaatataccacagactggtggattaaacaacagcaatttattttttcatagttctgggggctggaagtttaaggtcaaaatgcaggcaggactggtttcctgagatctctctccttgacttgcagatggctatgttcttgatgcctcttcaggtggctttttctctgtgcatgcacttccctggtgtctctttttgtgttcaaattacttcttataagtacaccattcagattggattagggcctaccctagtaccttcattttaacttaaattgcctcctttaaagccttatctccaaatgcagtcacatcctgaagcactgaggattagaacttcaacctacgggctttggatgggcagacttcagcccataacactcttagttatagttcatactttcttgctttttgaattcctggtacttttttgttgatttctgtacattttaaagtttaaatgttagttgccaaattttgatttatttattttaatagtgttggacttgttctgacatgcagttaagttactcgggttcagtttgatctttacaagtctcacttttaagatttgttagtggaggtccagagcagccttcagtccaaggctaattttaccaatatcccctctactccttgcaaataaggtgatacgtttctgagaatacaacccattgccctgtatttataggactttctattctggtgtgtgtgaatacaaattatttgcagtcctgtgtaaactctggcaattatttgtcctgttgatctctgatatctctttactcacattcatgaagtttcttatcatatatgaactgattattaatcaaagacttgaggattctcctctaccaatctccgaggcgtctttctgtggatctcccttcccttccatattctgctccacaaattccagctgtttgggccttaatgtaactccgttctttgtctcctcagtgtagtcaccaatctttgctggagtttcccctgtctgctgcagccagcagattgcctccaggcaataagcaaagagagtgacggtgcttagcttgttttcttcccttttctcagggatcatagttccatgctacctattattcagtgtccgaaaatacttatttcatctattttgtttgctttttttctagatttttaatgtaaaagggtagatctactccctattaccccatcatggctgcaagtaaaattctattttcacagcttttagtttcatttttcaaggtaaaaagttttaataactttttttcagtatttactattaatttttggtaccaattttaatggattcaatgtcttttgttcagtgcgagttattctgacataattaagacatactggattttcccaagatatgagatgaaatattaataattttgacatcctaggaagaatcaaatacaaatcaaacttgggaagaaggtcaatttgaaatattatttatttcctgggatttatttagtctatttgttagagatacgtattatttaactactaaaattttatattagagaataataaaaactgcttgaaatttgttaccattattgcagtgcataaataaaaaagaactagatgaatatgttttttgttttactgtgaatataaattagccacttaaaattattatttcaaattggtaatatcttttttctttccttccttattcatcgctgcttttgcaaatccgtgtaggaattttagataactatgtgtaaagtgtctaataaaagaagaatgtacatagttcagtgtggactgaacatctattcagaagtcacctgtttagcaattgacatctatcaattgctgctcttaatgaggttgctggtttcaccaatgacaagtcatgaaaagactaaggcaaactgataaatctctacctgataataagcatatttgtgctcataggtacattctttgaattatcctaaattctagaatgaaaagtatgaggtaaataaaatattttcctggttgacatttacatttggaaataattagaaaattgttttcaatatgtaaaatagcaagaaatcaactttgttaatactttaaaccatgctcataaagcatacttcttgtcatgttctgcctaattttacacctgattttccattttctctgctcttgttctagaaaaacagttggtgttttctgttgtggacccaattcactatccaagactcttcataaactgagtaaccagaacaactcatatgggacaagatttgaatacaataaagagtctttcagctgaaaacttttgccatgaagcaggactctaaagaaggaatgagtgcaatttctaagactttgaaactcagcggaatcaatcagctgtgttatgccaaagaatagtaaggttttcttatttatgattatttaaaatggaaatgtgagaatgtggcaagatgaccgtcacattacatgtttaatctggaaaccaaagagaccctgaagaatatttgatgtgatgattcacttttcagttctcaaattaaaagaaaactgttagatgcacactgttgattttcatggtggattcaagaactccctagtgaggagctgaacttgctcaatctaaggctgattgtcgtgttcctctttaaattgtttttggttgaacaaatgcaagattgaacaaaattaaaaattcattgaagctgaaattccattttctgtgttgtgtataaacagagtagctttaatttgcaagcactccaggcaaatatattagatgtttgaaaacacagcacaagactctgtattgatacgggtactttgtgtcaatatctaatcgtctccactacttatgctaatacctctatttgatatctgaagactatatgctaactgaaccttcctcaaatgttgttatagtatctatttttatatatttttttctttttattcctctctctagggaaatatgccttcccttagcatgcattagacataatgatttaataggtccctttcatcttcatttaaatctatcactattgcatggtaatgaaaatattcctactataaattataaagggatatatatatatggatatatatatgtatatacacatatatatatacacacacacacacatatatatatatatatatatatatacacatatactaataacttttcccttttttcagcatttttgtctctattattattattgtttttttcccaggtagggtttgtcttaggctgtagcctctaaggatagttagttaatttgcactttgagaccaaaggacatcatgtgtgtcagtagggactgaatataagatttatctcctttgccacacattggtttatgatggagacattgaaagtctagtcatattcctgaacagtaaaacctgtattttaccttttaagtaagaggaaatatgatattcttattcaaacttaagtttagaatccagaatattactgtcgcactttttggtatcctgagtttccatagggaactattgggtttaaagtcaccgttggaactacactgtgtgatcttataaacttatgttccctggctatcatattcttggctcagaacaatatttcccattactatcttaagaattaaggcattcatggctcacgcctgtaatcccggcactttgggaggccaaggcaggtggatcacgaggtcagagttcaagaccagcctgaccaagttggtgaaaccccatcgctactaaaaatacaaatattaggcgggtgtggtggcgggtgcctataatcccaactactcgggagactgaggcaaagaatcgcttgaacccggtgggcggaggttgcagtgagccaagattgcaccactgcactccagcctgggtgacagagcaagattccatctcaaaaaaaaaaaaaaaaaaaaaaaaaaagaattaaagcattcatacagtttagtgattttgtttagtagtcggctatcaattgctatcaaatataacactgctgaaatcagcagtgtgacttaccttgccattgttaaaatgttacataaaacataacatgatagatgctaaggcctttttttgctataattcaccaatagcaatcaagcatgctaacccatactgaatgatatttacttgtagatatttcttcctttccttgaaattctcctttctatggaaagaagatgaacccaaaaaagtgataggaaatgtggaatgctcatgcagatttagctctgaaggcatatttaataactagtatgtcttgacaacagtctttagattaaaaagaattttcatggaaacatttaacagaaagaactagtaaaaagacactttgagttagtccaggcttaatgtgcaatactgactctatactgatcataatttatttatgcgatcatattaatagacctaatttcattaaaacaggtagaagatttttcaaaagaaagatgatgtttcaaagctggtctgccattctagatgagcctccttgcttatttaagttccagtaggtgttcaaatgttaaatgttaaacataggtcatctttgcttctgcagggcttcatcttgcatgtttaagagaactttgttttattttgagggattatttctctggggatcattcttataatacaagccttaaatcactaattttagtagcaataaatgttaaaattgaaatggtgtccttgaagtttctataagctcactataactttggaacaaataaagcagcaacatttgttcacaagatgatgcaagtctaggaaacacactctgcttgtcaggaattagcatttgcaccggccgtggtggctcacacctgtaatcccagcactttgggaggccgaggcgggtagatcacttgaggtcaggagttgaagaccaacctggccaacatggtgaaaccccatctctactaaaaatacaaaaattagccagacatggtggtgggtgcctatagtcccagctactcgggaggctgaggcatgagaatcacttgaaccggggaggcaaggccgaggttgcagtgagccgagattgcgccactgcactccaaccctgccctggaaacagagtgagactctgtctcaaaaaaaaaaaaaaaaaaaaaaaaaggaattggcactagcatgagaagccttaggaatctgagttctggaactatcaatgttgtcacaggctaatggtgtaactaagtcaaattacttctcatacatagactaaaatgtatcattttattaatttttggatagtgtatccttttgagaatctgattaaaatgcttagcatgacatacagcacatccctacaattttggggaacctacaaacacactccagaaagaagcacatctgtttaagaacctctaaacaaaatggctattgctataggtctttctactcatacacttcttttctttttctttttttttttttttttttttttttttctgagacggggtcttccagccacactggcatgcagtgacatgatctcagttcactgcaacctccacctcctgaactgaggtgatccttccatctcagcctaccaagtaactgggactacaggcacacgccaccatacctagccaatttttgtatttttagtagagacaggggtttcacaatgttgaccaggctggtctcaaactcctgggcttaagtgattctcccaccttggcctctcaaagtgctgggattacaggtgtgagccaccacgcctgccccaaactaccaatttctataggattataccaagacatttattttgtggacaagggcattctctttatatgttcccaaacagagaattcaataggactttccatcggtttttaatcttgctgtatcacctgatttatgcaagggaaggctataatttttaaatataaataattctaaaaaactatgattcatacacacacactcatacatatatactacataaatccatacatatacatacatacaattgggacttcatttgcttttttaaaaatttcaagttaaaagtgaaatgcttgatagttcttcattcagtgatgttaaaatgccagttgggtgactgtggtagtataggcatttaaaacaacagcataaaagcaatgtagacaaggaacagggtgaatcaat

SEQ ID NO: 5 - DNA, 4459 bp, Homo sapiens
cctagacaaaggggccggcgcggcggagcagactggtgcagcctgggccgcgcgctcagagcgctgggcgtctgggcagctgagtgggcagagctgacccggtgcgggtgggagtcagggcgcccggaaaacccggctctgggtagcagaccccgcccgggctggctcggcgccgggccttcgggcttccactcagtctttgaccctcggtcctcgctcagcggcccggcaggccgcacaactgtaaccgctgccccggccgccgcccgctccttctcggtccggcgggcacagagcgcagcgcggcggggccggcggcatggctgtgtcctggaggagctggctcgccaacgaaggggttaaacacctctgcctgttcatctggctctccatgaatgtcctgcttttctggaaaaccttcttgctgtataaccaagggccagagtatcactacctccaccagatgttggggctaggattgtgtctaagcagagcctcagcatctgttcttaacctcaactgcagccttatccttttacccatgtgccgaacactcttggcttacctccgaggatcacagaaggttccaagcaggagaaccaggagattgttggataaaagcagaacattccatattacctgtggtgttactatctgtattttctcaggcgtgcatgtggctgcccatctggtgaatgccctcaacttctcagtgaattacagtgaagactttgttgaactgaatgcagcaagataccgagatgaggatcctagaaaacttctcttcacaactgttcctggcctgacaggggtctgcatggtggtggtgctattcctcatgatcacagcctctacatatgcaataagagtttctaactatgatatcttctggtatactcataacctcttctttgtcttctacatgctgctgacgttgcatgtttcaggagggctgctgaagtatcaaactaatttagatacccaccctcccggctgcatcagtcttaaccgaaccagctctcagaatatttccttaccagagtatttctcagaacattttcatgaacctttccctgaaggattttcaaaaccggcagagtttacccagcacaaatttgtgaagatttgtatggaagagcccagattccaagctaattttccacagacttggctttggatttctggacctttgtgcctgtactgtgccgaaagactttacaggtatatccggagcaataagccagtcaccatcatttcggtcataagtcatccctcagatgtcatggaaatccgaatggtcaaagaaaattttaaagcaagacctggtcagtatattactctacattgtcccagtgtatctgcattagaaaatcatccatttaccctcacaatgtgtccaactgaaaccaaagcaacatttggggttcatcttaaaatagtaggagactggacagaacgatttcgagatttactactgcctccatctagtcaagactccgaaattctgcccttcattcaatctagaaattatcccaagctgtatattgatggtccttttggaagtccatttgaggaatcactgaactatgaggtcagcctctgcgtggctggaggcattggagtaactccatttgcatcaatactcaacaccctgttggatgactggaaaccatacaagcttagaagactatactttatttgggtatgcagagatatccagtccttccgttggtttgcagatttactctgtatgttgcataacaagttttggcaagagaacagacctgactatgtcaacatccagctgtacctcagtcaaacagatgggatacagaagataattggagaaaaatatcatgcactgaattcaagactgtttataggacgtcctcggtggaaacttttgtttgatgaaatagcaaaatataacagaggaaaaacagttggtgttttctgttgtggacccaattcactatccaagactcttcataaactgagtaaccagaacaactcatatgggacaagatttgaatacaataaagagtctttcagctgaaaacttttgccatgaagcaggactctaaagaaggaatgagtgcaatttctaagactttgaaactcagcggaatcaatcagctgtgttatgccaaagaatagtaaggttttcttatttatgattatttaaaatggaaatgtgagaatgtggcaagatgaccgtcacattacatgtttaatctggaaaccaaagagaccctgaagaatatttgatgtgatgattcacttttcagttctcaaattaaaagaaaactgttagatgcacactgttgattttcatggtggattcaagaactccctagtgaggagctgaacttgctcaatctaaggctgattgtcgtgttcctctttaaattgtttttggttgaacaaatgcaagattgaacaaaattaaaaattcattgaagctgaaattccattttctgtgttgtgtataaacagagtagctttaatttgcaagcactccaggcaaatatattagatgtttgaaaacacagcacaagactctgtattgatacgggtactttgtgtcaatatctaatcgtctccactacttatgctaatacctctatttgatatctgaagactatatgctaactgaaccttcctcaaatgttgttatagtatctatttttatatatttttttctttttattcctctctctagggaaatatgccttcccttagcatgcattagacataatgatttaataggtccctttcatcttcatttaaatctatcactattgcatggtaatgaaaatattcctactataaattataaagggatatatatatatggatatatatatgtatatacacatatatatatacacacacacacacatatatatatatatatatatatatacacatatactaataacttttcccttttttcagcatttttgtctctattattattattgtttttttcccaggtagggtttgtcttaggctgtagcctctaaggatagttagttaatttgcactttgagaccaaaggacatcatgtgtgtcagtagggactgaatataagatttatctcctttgccacacattggtttatgatggagacattgaaagtctagtcatattcctgaacagtaaaacctgtattttaccttttaagtaagaggaaatatgatattcttattcaaacttaagtttagaatccagaatattactgtcgcactttttggtatcctgagtttccatagggaactattgggtttaaagtcaccgttggaactacactgtgtgatcttataaacttatgttccctggctatcatattcttggctcagaacaatatttcccattactatcttaagaattaaggcattcatggctcacgcctgtaatcccggcactttgggaggccaaggcaggtggatcacgaggtcagagttcaagaccagcctgaccaagttggtgaaaccccatcgctactaaaaatacaaatattaggcgggtgtggtggcgggtgcctataatcccaactactcgggagactgaggcaaagaatcgcttgaacccggtgggcggaggttgcagtgagccaagattgcaccactgcactccagcctgggtgacagagcaagattccatctcaaaaaaaaaaaaaaaaaaaaaaaaaaagaattaaagcattcatacagtttagtgattttgtttagtagtcggctatcaattgctatcaaatataacactgctgaaatcagcagtgtgacttaccttgccattgttaaaatgttacataaaacataacatgatagatgctaaggcctttttttgctataattcaccaatagcaatcaagcatgctaacccatactgaatgatatttacttgtagatatttcttcctttccttgaaattctcctttctatggaaagaagatgaacccaaaaaagtgataggaaatgtggaatgctcatgcagatttagctctgaaggcatatttaataactagtatgtcttgacaacagtctttagattaaaaagaattttcatggaaacatttaacagaaagaactagtaaaaagacactttgagttagtccaggcttaatgtgcaatactgactctatactgatcataatttatttatgcgatcatattaatagacctaatttcattaaaacaggtagaagatttttcaaaagaaagatgatgtttcaaagctggtctgccattctagatgagcctccttgcttatttaagttccagtaggtgttcaaatgttaaatgttaaacataggtcatctttgcttctgcagggcttcatcttgcatgtttaagagaactttgttttattttgagggattatttctctggggatcattcttataatacaagccttaaatcactaattttagtagcaataaatgttaaaattgaaa

SEQ ID NO: 6 - DNA, 22 bp, Artificial sequence
  Primer
tcctactgaaaccaaagcaaca

SEQ ID NO: 7 - DNA, 22 bp, Artificial sequence
  Primer
aatgaagggcagaatctcagag

SEQ ID NO: 8 - DNA, 24 bp, Artificial sequence
  Probe
agactggacagaacgattccggga

SEQ ID NO: 9 - DNA, 15 bp, Artificial sequence
  Primer
tcgccgcttgctgca

SEQ ID NO: 10 - DNA, 17 bp, Artificial sequence
  Primer
atcggccgtgatgtcga

SEQ ID NO: 11 - DNA, 23 bp, Artificial sequence
  Probe
ccatggtcaaccccaccgtgttc

SEQ ID NO: 12 - DNA, 16 bp, Artificial sequence
  Synthetic oligonucleotide
tcccaccgcgctgctc

SEQ ID NO: 13 - DNA, 16 bp, Artificial sequence
  Synthetic oligonucleotide
ggcagcagatccaggg

SEQ ID NO: 14 - DNA, 16 bp, Artificial sequence
  Synthetic oligonucleotide
ctccaggacaccgcca

SEQ ID NO: 15 - DNA, 16 bp, Artificial sequence
  Synthetic oligonucleotide
ccagaaaagtagaacg

SEQ ID NO: 16 - DNA, 16 bp, Artificial sequence
  Synthetic oligonucleotide
aaaggatgaggctgca

SEQ ID NO: 17 - DNA, 16 bp, Artificial sequence
  Synthetic oligonucleotide
tgctagggaccttctg

SEQ ID NO: 18 - DNA, 16 bp, Artificial sequence
  Synthetic oligonucleotide
agatagttacaccaca

SEQ ID NO: 19 - DNA, 16 bp, Artificial sequence
  Synthetic oligonucleotide
tggtatcttgctgcat

SEQ ID NO: 20 - DNA, 16 bp, Artificial sequence
  Synthetic oligonucleotide
caccaccatgcagaca

SEQ ID NO: 21 - DNA, 16 bp, Artificial sequence
  Synthetic oligonucleotide
atatcataattagaaa

SEQ ID NO: 22 - DNA, 16 bp, Artificial sequence
  Synthetic oligonucleotide
acatgcaacagcagca

SEQ ID NO: 23 - DNA, 16 bp, Artificial sequence
  Synthetic oligonucleotide
caggagggtgagtgtc

SEQ ID NO: 24 - DNA, 16 bp, Artificial sequence
  Synthetic oligonucleotide
caaagatccatgaaaa

SEQ ID NO: 25 - DNA, 16 bp, Artificial sequence
  Synthetic oligonucleotide
aggcaaatcttcacaa

SEQ ID NO: 26 - DNA, 16 bp, Artificial sequence
  Synthetic oligonucleotide
gtccagaaatccaaat

SEQ ID NO: 27 - DNA, 16 bp, Artificial sequence
  Synthetic oligonucleotide
tgacaggtttgttgct

SEQ ID NO: 28 - DNA, 16 bp, Artificial sequence
  Synthetic oligonucleotide
atacggagttccatta

SEQ ID NO: 29 - DNA, 16 bp, Artificial sequence
  Synthetic oligonucleotide
gggcaatggagaataa

SEQ ID NO: 30 - DNA, 16 bp, Artificial sequence
  Synthetic oligonucleotide
tgctttggtttcagta

SEQ ID NO: 31 - DNA, 16 bp, Artificial sequence
  Synthetic oligonucleotide
atggaggcagtagcaa

SEQ ID NO: 32 - DNA, 16 bp, Artificial sequence
  Synthetic oligonucleotide
acttagggtaatttct

SEQ ID NO: 33 - DNA, 16 bp, Artificial sequence
  Synthetic oligonucleotide
tcatagttcagtgact

SEQ ID NO: 34 - DNA, 16 bp, Artificial sequence
  Synthetic oligonucleotide
tttagtatcgatgcaa

SEQ ID NO: 35 - DNA, 16 bp, Artificial sequence
  Synthetic oligonucleotide
acccagataaagtaca

SEQ ID NO: 36 - DNA, 16 bp, Artificial sequence
  Synthetic oligonucleotide
tgcaacacacagagta

SEQ ID NO: 37 - DNA, 16 bp, Artificial sequence
  Synthetic oligonucleotide
tcgaattcagtgtgtg

SEQ ID NO: 38 - DNA, 16 bp, Artificial sequence
  Synthetic oligonucleotide
acattttgctatttca

SEQ ID NO: 39 - DNA, 16 bp, Artificial sequence
  Synthetic oligonucleotide
atgaagagtcttggaa

SEQ ID NO: 40 - DNA, 16 bp, Artificial sequence
  Synthetic oligonucleotide
ttattgtattcaaatt

SEQ ID NO: 41 - DNA, 16 bp, Artificial sequence
  Synthetic oligonucleotide
ctctttaaagtcccca

SEQ ID NO: 42 - DNA, 16 bp, Artificial sequence
  Synthetic oligonucleotide
gcacagctgtttgatt

SEQ ID NO: 43 - DNA, 16 bp, Artificial sequence
  Synthetic oligonucleotide
tgccattttgccacat

SEQ ID NO: 44 - DNA, 16 bp, Artificial sequence
  Synthetic oligonucleotide
atcaaaatgtgaatca

SEQ ID NO: 45 - DNA, 16 bp, Artificial sequence
  Synthetic oligonucleotide
cttgaatttcccataa

SEQ ID NO: 46 - DNA, 16 bp, Artificial sequence
  Synthetic oligonucleotide
aaagagggctgcagct

SEQ ID NO: 47 - DNA, 16 bp, Artificial sequence
  Synthetic oligonucleotide
atccaaatgaaagcta

SEQ ID NO: 48 - DNA, 16 bp, Artificial sequence
  Synthetic oligonucleotide
acccgtatcgatacaa

SEQ ID NO: 49 - DNA, 16 bp, Artificial sequence
  Synthetic oligonucleotide
ctgcagcgaggcagga

SEQ ID NO: 50 - DNA, 16 bp, Artificial sequence
  Synthetic oligonucleotide
agatactacatccaca

SEQ ID NO: 51 - DNA, 16 bp, Artificial sequence
  Synthetic oligonucleotide
caagattggctaaggg

SEQ ID NO: 52 - DNA, 16 bp, Artificial sequence
  Synthetic oligonucleotide
ctaaattgaacaaatc

SEQ ID NO: 53 - DNA, 16 bp, Artificial sequence
  Synthetic oligonucleotide
ggtttttaaggataag

SEQ ID NO: 54 - DNA, 16 bp, Artificial sequence
  Synthetic oligonucleotide
tcaaagtgagtcaaag

SEQ ID NO: 55 - DNA, 16 bp, Artificial sequence
  Synthetic oligonucleotide
tgtagaaagcaaagca

SEQ ID NO: 56 - DNA, 16 bp, Artificial sequence
  Synthetic oligonucleotide
tattagtgattctaaa

SEQ ID NO: 57 - DNA, 16 bp, Artificial sequence
  Synthetic oligonucleotide
gacttaaatctagtaa

SEQ ID NO: 58 - DNA, 16 bp, Artificial sequence
  Synthetic oligonucleotide
cctgaatattaaaaaa

SEQ ID NO: 59 - DNA, 16 bp, Artificial sequence
  Synthetic oligonucleotide
ataaactgtatgaata

SEQ ID NO: 60 - DNA, 16 bp, Artificial sequence
  Synthetic oligonucleotide
agcaatgtgtcctatt

SEQ ID NO: 61 - DNA, 16 bp, Artificial sequence
  Synthetic oligonucleotide
tgatatacaaaagatt

SEQ ID NO: 62 - DNA, 16 bp, Artificial sequence
  Synthetic oligonucleotide
actgaatcacatgaaa

SEQ ID NO: 63 - DNA, 16 bp, Artificial sequence
  Synthetic oligonucleotide
aatatacaggtggtta

SEQ ID NO: 64 - DNA, 16 bp, Artificial sequence
  Synthetic oligonucleotide
cataggagggatagga

SEQ ID NO: 65 - DNA, 16 bp, Artificial sequence
  Synthetic oligonucleotide
agtttatgtctccaca

SEQ ID NO: 66 - DNA, 16 bp, Artificial sequence
  Synthetic oligonucleotide
tgtagtatgtgttttg

SEQ ID NO: 67 - DNA, 16 bp, Artificial sequence
  Synthetic oligonucleotide
aatcagtattgcacat

SEQ ID NO: 68 - DNA, 16 bp, Artificial sequence
  Synthetic oligonucleotide
gaaatgtgatgaattc

SEQ ID NO: 69 - DNA, 16 bp, Artificial sequence
  Synthetic oligonucleotide
acacaagtctgaaata

SEQ ID NO: 70 - DNA, 16 bp, Artificial sequence
  Synthetic oligonucleotide
tgcactggagtttaga

SEQ ID NO: 71 - DNA, 16 bp, Artificial sequence
  Synthetic oligonucleotide
aatttattcctgttca

SEQ ID NO: 72 - DNA, 16 bp, Artificial sequence
  Synthetic oligonucleotide
atagaatctaaaaaga

SEQ ID NO: 73 - DNA, 16 bp, Artificial sequence
  Synthetic oligonucleotide
tattaccatcaaaatt

SEQ ID NO: 74 - DNA, 16 bp, Artificial sequence
  Synthetic oligonucleotide
cacaatcgcccaacat

SEQ ID NO: 75 - DNA, 16 bp, Artificial sequence
  Synthetic oligonucleotide
gaaactgtatatccat

SEQ ID NO: 76 - DNA, 16 bp, Artificial sequence
  Synthetic oligonucleotide
aggcatggttcatctt

SEQ ID NO: 77 - DNA, 16 bp, Artificial sequence
  Synthetic oligonucleotide
tattggtaaaaactgg

SEQ ID NO: 78 - DNA, 16 bp, Artificial sequence
  Synthetic oligonucleotide
acttacatggacacat

SEQ ID NO: 79 - DNA, 16 bp, Artificial sequence
  Synthetic oligonucleotide
agtattggaattcagg

SEQ ID NO: 80 - DNA, 16 bp, Artificial sequence
  Synthetic oligonucleotide
gtctgacccttacctt

SEQ ID NO: 81 - DNA, 16 bp, Artificial sequence
  Synthetic oligonucleotide
gttcatactgggttac

SEQ ID NO: 82 - DNA, 16 bp, Artificial sequence
  Synthetic oligonucleotide
actgacaataagaggc

SEQ ID NO: 83 - DNA, 16 bp, Artificial sequence
  Synthetic oligonucleotide
gcctttaaatacaaaa

SEQ ID NO: 84 - DNA, 16 bp, Artificial sequence
  Synthetic oligonucleotide
cttaactacacagaaa

SEQ ID NO: 85 - DNA, 16 bp, Artificial sequence
  Synthetic oligonucleotide
ccccaccgagggatct

SEQ ID NO: 86 - DNA, 16 bp, Artificial sequence
  Synthetic oligonucleotide
ctccacccggctccca

SEQ ID NO: 87 - DNA, 16 bp, Artificial sequence
  Synthetic oligonucleotide
agcgatcagtggccgg

SEQ ID NO: 88 - DNA, 16 bp, Artificial sequence
  Synthetic oligonucleotide
aggaaggttttccaga

SEQ ID NO: 89 - DNA, 16 bp, Artificial sequence
  Synthetic oligonucleotide
tgcagatgctctgctt

SEQ ID NO: 90 - DNA, 16 bp, Artificial sequence
  Synthetic oligonucleotide
gcacataggtaaaagg

SEQ ID NO: 91 - DNA, 16 bp, Artificial sequence
  Synthetic oligonucleotide
caacaatcttcttgtt

SEQ ID NO: 92 - DNA, 16 bp, Artificial sequence
  Synthetic oligonucleotide
gttcactgaaaagttg

SEQ ID NO: 93 - DNA, 16 bp, Artificial sequence
  Synthetic oligonucleotide
agctttctgggatcct

SEQ ID NO: 94 - DNA, 16 bp, Artificial sequence
  Synthetic oligonucleotide
aggaacaataccacca

SEQ ID NO: 95 - DNA, 16 bp, Artificial sequence
  Synthetic oligonucleotide
aaccacctgaaacatg

SEQ ID NO: 96 - DNA, 16 bp, Artificial sequence
  Synthetic oligonucleotide
actaatgcagccagga

SEQ ID NO: 97 - DNA, 16 bp, Artificial sequence
  Synthetic oligonucleotide
gaaaaccctcgaggca

SEQ ID NO: 98 - DNA, 16 bp, Artificial sequence
  Synthetic oligonucleotide
gaacttgggttcttcc

SEQ ID NO: 99 - DNA, 16 bp, Artificial sequence
  Synthetic oligonucleotide
ataaaggcacaaaggt

SEQ ID NO: 100 - DNA, 16 bp, Artificial sequence
  Synthetic oligonucleotide
actgagatgatggtga

SEQ ID NO: 101 - DNA, 16 bp, Artificial sequence
  Synthetic oligonucleotide
gctttaaagttttctt

SEQ ID NO: 102 - DNA, 16 bp, Artificial sequence
  Synthetic oligonucleotide
tctaatgctgatacac

SEQ ID NO: 103 - DNA, 16 bp, Artificial sequence
  Synthetic oligonucleotide
ggacaccaaatgttgc

SEQ ID NO: 104 - DNA, 16 bp, Artificial sequence
  Synthetic oligonucleotide
tctcagagtcttgact

SEQ ID NO: 105 - DNA, 16 bp, Artificial sequence
  Synthetic oligonucleotide
atcaatgtataactta

SEQ ID NO: 106 - DNA, 16 bp, Artificial sequence
  Synthetic oligonucleotide
agagactaacttcata

SEQ ID NO: 107 - DNA, 16 bp, Artificial sequence
  Synthetic oligonucleotide
atccagtagagtgttt

SEQ ID NO: 108 - DNA, 16 bp, Artificial sequence
  Synthetic oligonucleotide
aatgattggatgtctc

SEQ ID NO: 109 - DNA, 16 bp, Artificial sequence
  Synthetic oligonucleotide
aatgaaaagtctcgaa

SEQ ID NO: 110 - DNA, 16 bp, Artificial sequence
  Synthetic oligonucleotide
tccaactgttttccct

SEQ ID NO: 111 - DNA, 16 bp, Artificial sequence
  Synthetic oligonucleotide
ggttactcaaactatg

SEQ ID NO: 112 - DNA, 16 bp, Artificial sequence
  Synthetic oligonucleotide
ctgaaggattctttat

SEQ ID NO: 113 - DNA, 16 bp, Artificial sequence
  Synthetic oligonucleotide
ttgcacttgttcctct

SEQ ID NO: 114 - DNA, 16 bp, Artificial sequence
  Synthetic oligonucleotide
agcaaacccttggtat

SEQ ID NO: 115 - DNA, 16 bp, Artificial sequence
  Synthetic oligonucleotide
cagattaaccatgcca

SEQ ID NO: 116 - DNA, 16 bp, Artificial sequence
  Synthetic oligonucleotide
ttaatttgctcatcaa

SEQ ID NO: 117 - DNA, 16 bp, Artificial sequence
  Synthetic oligonucleotide
tgtaagagacttcttg

SEQ ID NO: 118 - DNA, 16 bp, Artificial sequence
  Synthetic oligonucleotide
cgaaaacaatttaaag

SEQ ID NO: 119 - DNA, 16 bp, Artificial sequence
  Synthetic oligonucleotide
gaaaatggagtctgag

SEQ ID NO: 120 - DNA, 16 bp, Artificial sequence
  Synthetic oligonucleotide
tcccagtgtttgcctg

SEQ ID NO: 121 - DNA, 16 bp, Artificial sequence
  Synthetic oligonucleotide
agatatgaagtacccg

SEQ ID NO: 122 - DNA, 16 bp, Artificial sequence
  Synthetic oligonucleotide
gattaggaacactgca

SEQ ID NO: 123 - DNA, 16 bp, Artificial sequence
  Synthetic oligonucleotide
caaacataagtagata

SEQ ID NO: 124 - DNA, 16 bp, Artificial sequence
  Synthetic oligonucleotide
ataattgtgtccaaga

SEQ ID NO: 125 - DNA, 16 bp, Artificial sequence
  Synthetic oligonucleotide
tactaagccatgggac

SEQ ID NO: 126 - DNA, 16 bp, Artificial sequence
  Synthetic oligonucleotide
tacaaagctctttggt

SEQ ID NO: 127 - DNA, 16 bp, Artificial sequence
  Synthetic oligonucleotide
cttatctgaaatcaaa

SEQ ID NO: 128 - DNA, 16 bp, Artificial sequence
  Synthetic oligonucleotide
gaagaagttctacttt

SEQ ID NO: 129 - DNA, 16 bp, Artificial sequence
  Synthetic oligonucleotide
gtgcaaaaataatatt

SEQ ID NO: 130 - DNA, 16 bp, Artificial sequence
  Synthetic oligonucleotide
gatcacatgaacaggg

SEQ ID NO: 131 - DNA, 16 bp, Artificial sequence
  Synthetic oligonucleotide
gtaaattttccttctg

SEQ ID NO: 132 - DNA, 16 bp, Artificial sequence
  Synthetic oligonucleotide
aaattaagttgataaa

SEQ ID NO: 133 - DNA, 16 bp, Artificial sequence
  Synthetic oligonucleotide
gtactaatttcagcaa

SEQ ID NO: 134 - DNA, 16 bp, Artificial sequence
  Synthetic oligonucleotide
ttgtaatcatgtgata

SEQ ID NO: 135 - DNA, 16 bp, Artificial sequence
  Synthetic oligonucleotide
tagtatgcttgtctgt

SEQ ID NO: 136 - DNA, 16 bp, Artificial sequence
  Synthetic oligonucleotide
atatatgtgtaactaa

SEQ ID NO: 137 - DNA, 16 bp, Artificial sequence
  Synthetic oligonucleotide
ttgcacattgcccata

SEQ ID NO: 138 - DNA, 16 bp, Artificial sequence
  Synthetic oligonucleotide
tatgatgtcatagttt

SEQ ID NO: 139 - DNA, 16 bp, Artificial sequence
  Synthetic oligonucleotide
tatgaggtttattttt

SEQ ID NO: 140 - DNA, 16 bp, Artificial sequence
  Synthetic oligonucleotide
gattggtaaggaatca

SEQ ID NO: 141 - DNA, 16 bp, Artificial sequence
  Synthetic oligonucleotide
cctgaatttttgaaat

SEQ ID NO: 142 - DNA, 16 bp, Artificial sequence
  Synthetic oligonucleotide
ctcaacatagcacaca

SEQ ID NO: 143 - DNA, 16 bp, Artificial sequence
  Synthetic oligonucleotide
atagatccttgaacat

SEQ ID NO: 144 - DNA, 16 bp, Artificial sequence
  Synthetic oligonucleotide
gataaagctttaattt

SEQ ID NO: 145 - DNA, 16 bp, Artificial sequence
  Synthetic oligonucleotide
cagtaaccaccaccat

SEQ ID NO: 146 - DNA, 16 bp, Artificial sequence
  Synthetic oligonucleotide
atttattaccatcaaa

SEQ ID NO: 147 - DNA, 16 bp, Artificial sequence
  Synthetic oligonucleotide
agcattgtgagagtaa

SEQ ID NO: 148 - DNA, 16 bp, Artificial sequence
  Synthetic oligonucleotide
ctacagacaaagaaac

SEQ ID NO: 149 - DNA, 16 bp, Artificial sequence
  Synthetic oligonucleotide
acacagtaagaaggca

SEQ ID NO: 150 - DNA, 16 bp, Artificial sequence
  Synthetic oligonucleotide
tcagaaatacaggtga

SEQ ID NO: 151 - DNA, 16 bp, Artificial sequence
  Synthetic oligonucleotide
gataaaggacttacaa

SEQ ID NO: 152 - DNA, 16 bp, Artificial sequence
  Synthetic oligonucleotide
gttactatcactcata

SEQ ID NO: 153 - DNA, 16 bp, Artificial sequence
  Synthetic oligonucleotide
accatataaacatttt

SEQ ID NO: 154 - DNA, 16 bp, Artificial sequence
  Synthetic oligonucleotide
gtttatgaattctgat

SEQ ID NO: 155 - DNA, 16 bp, Artificial sequence
  Synthetic oligonucleotide
ctcaataacaccatga

SEQ ID NO: 156 - DNA, 16 bp, Artificial sequence
  Synthetic oligonucleotide
tcacattggcaattaa

SEQ ID NO: 157 - DNA, 16 bp, Artificial sequence
  Synthetic oligonucleotide
agaaccatctttgttc

SEQ ID NO: 158 - DNA, 16 bp, Artificial sequence
  Synthetic oligonucleotide
aaagatgtcatgcaat

SEQ ID NO: 159 - DNA, 16 bp, Artificial sequence
  Synthetic oligonucleotide
ctgtactgagtctgga

SEQ ID NO: 160 - DNA, 16 bp, Artificial sequence
  Synthetic oligonucleotide
caggaccgaaaggagc

SEQ ID NO: 161 - DNA, 16 bp, Artificial sequence
  Synthetic oligonucleotide
caaatgagcaggcaga

SEQ ID NO: 162 - DNA, 16 bp, Artificial sequence
  Synthetic oligonucleotide
tagtagtattctggcc

SEQ ID NO: 163 - DNA, 16 bp, Artificial sequence
  Synthetic oligonucleotide
gttcaggacagatgca

SEQ ID NO: 164 - DNA, 16 bp, Artificial sequence
  Synthetic oligonucleotide
agccaggactgtccgg

SEQ ID NO: 165 - DNA, 16 bp, Artificial sequence
  Synthetic oligonucleotide
gtgtagagtcttgctt

SEQ ID NO: 166 - DNA, 16 bp, Artificial sequence
  Synthetic oligonucleotide
ctacatgcacacctga

SEQ ID NO: 167 - DNA, 16 bp, Artificial sequence
  Synthetic oligonucleotide
aggaaatcttcactgt

SEQ ID NO: 168 - DNA, 16 bp, Artificial sequence
  Synthetic oligonucleotide
aggaatggttgtgaag

SEQ ID NO: 169 - DNA, 16 bp, Artificial sequence
  Synthetic oligonucleotide
ctgtaaccatgaggaa

SEQ ID NO: 170 - DNA, 16 bp, Artificial sequence
  Synthetic oligonucleotide
gaagaggttgtgagta

SEQ ID NO: 171 - DNA, 16 bp, Artificial sequence
  Synthetic oligonucleotide
tgatacttcaacaaac

SEQ ID NO: 172 - DNA, 16 bp, Artificial sequence
  Synthetic oligonucleotide
atattctgggatgatg

SEQ ID NO: 173 - DNA, 16 bp, Artificial sequence
  Synthetic oligonucleotide
aacgatcttctaattt

SEQ ID NO: 174 - DNA, 16 bp, Artificial sequence
  Synthetic oligonucleotide
aaatgagcttggaact

SEQ ID NO: 175 - DNA, 16 bp, Artificial sequence
  Synthetic oligonucleotide
gtaaagtctctccgca

SEQ ID NO: 176 - DNA, 16 bp, Artificial sequence
  Synthetic oligonucleotide
gatgattgatgactga

SEQ ID NO: 177 - DNA, 16 bp, Artificial sequence
  Synthetic oligonucleotide
ggccaggtcttgcttt

SEQ ID NO: 178 - DNA, 16 bp, Artificial sequence
  Synthetic oligonucleotide
taaatgggtggttttc

SEQ ID NO: 179 - DNA, 16 bp, Artificial sequence
  Synthetic oligonucleotide
tactttaaagtggaca

SEQ ID NO: 180 - DNA, 16 bp, Artificial sequence
  Synthetic oligonucleotide
atgaagggcagaatct

SEQ ID NO: 181 - DNA, 16 bp, Artificial sequence
  Synthetic oligonucleotide
ccaaatggaccatcaa

SEQ ID NO: 182 - DNA, 16 bp, Artificial sequence
  Synthetic oligonucleotide
caaaccactggaatga

SEQ ID NO: 183 - DNA, 16 bp, Artificial sequence
  Synthetic oligonucleotide
acaaagtcaggtctgt

SEQ ID NO: 184 - DNA, 16 bp, Artificial sequence
  Synthetic oligonucleotide
aattatcttctgaatc

SEQ ID NO: 185 - DNA, 16 bp, Artificial sequence
  Synthetic oligonucleotide
cagcagaaaactccaa

SEQ ID NO: 186 - DNA, 16 bp, Artificial sequence
  Synthetic oligonucleotide
tatgagttgttccggt

SEQ ID NO: 187 - DNA, 16 bp, Artificial sequence
  Synthetic oligonucleotide
cctaaggtttcagctg

SEQ ID NO: 188 - DNA, 16 bp, Artificial sequence
  Synthetic oligonucleotide
ttctaagtcttagaaa

SEQ ID NO: 189 - DNA, 16 bp, Artificial sequence
  Synthetic oligonucleotide
taatcataaatagcaa

SEQ ID NO: 190 - DNA, 16 bp, Artificial sequence
  Synthetic oligonucleotide
agatattcttcagggc

SEQ ID NO: 191 - DNA, 16 bp, Artificial sequence
  Synthetic oligonucleotide
ctaacggcattctttt

SEQ ID NO: 192 - DNA, 16 bp, Artificial sequence
  Synthetic oligonucleotide
tgtaagtgagttcagc

SEQ ID NO: 193 - DNA, 16 bp, Artificial sequence
  Synthetic oligonucleotide
ttgaatgtgttcaacc

SEQ ID NO: 194 - DNA, 16 bp, Artificial sequence
  Synthetic oligonucleotide
tgcacaacctagaaaa

SEQ ID NO: 195 - DNA, 16 bp, Artificial sequence
  Synthetic oligonucleotide
ctacagtttcaacctc

SEQ ID NO: 196 - DNA, 16 bp, Artificial sequence
  Synthetic oligonucleotide
agtgaagcagcagata

SEQ ID NO: 197 - DNA, 16 bp, Artificial sequence
  Synthetic oligonucleotide
agctttgtgagcatat

SEQ ID NO: 198 - DNA, 16 bp, Artificial sequence
  Synthetic oligonucleotide
aggataagatgcaaac

SEQ ID NO: 199 - DNA, 16 bp, Artificial sequence
  Synthetic oligonucleotide
aaacagttctattaaa

SEQ ID NO: 200 - DNA, 16 bp, Artificial sequence
  Synthetic oligonucleotide
gcacattttcattact

SEQ ID NO: 201 - DNA, 16 bp, Artificial sequence
  Synthetic oligonucleotide
gtgtttggtgcaagat

SEQ ID NO: 202 - DNA, 16 bp, Artificial sequence
  Synthetic oligonucleotide
atgaattcagcatctc

SEQ ID NO: 203 - DNA, 16 bp, Artificial sequence
  Synthetic oligonucleotide
gaataaatactgaaga

SEQ ID NO: 204 - DNA, 16 bp, Artificial sequence
  Synthetic oligonucleotide
tgatatcaaacagtgc

SEQ ID NO: 205 - DNA, 16 bp, Artificial sequence
  Synthetic oligonucleotide
ataaactgattggatc

SEQ ID NO: 206 - DNA, 16 bp, Artificial sequence
  Synthetic oligonucleotide
ttcttaaggtagtaaa

SEQ ID NO: 207 - DNA, 16 bp, Artificial sequence
  Synthetic oligonucleotide
taattatataccaaat

SEQ ID NO: 208 - DNA, 16 bp, Artificial sequence
  Synthetic oligonucleotide
cataagttaaggtact

SEQ ID NO: 209 - DNA, 16 bp, Artificial sequence
  Synthetic oligonucleotide
taacaggatttattgt

SEQ ID NO: 210 - DNA, 16 bp, Artificial sequence
  Synthetic oligonucleotide
gctaaatgttttagta

SEQ ID NO: 211 - DNA, 16 bp, Artificial sequence
  Synthetic oligonucleotide
ctacatgagcattgca

SEQ ID NO: 212 - DNA, 16 bp, Artificial sequence
  Synthetic oligonucleotide
gacagcattgctatga

SEQ ID NO: 213 - DNA, 16 bp, Artificial sequence
  Synthetic oligonucleotide
gacaagcccaagtttt

SEQ ID NO: 214 - DNA, 16 bp, Artificial sequence
  Synthetic oligonucleotide
aaataagttatgattg

SEQ ID NO: 215 - DNA, 16 bp, Artificial sequence
  Synthetic oligonucleotide
tgtaagtttgacctga

SEQ ID NO: 216 - DNA, 16 bp, Artificial sequence
  Synthetic oligonucleotide
aaggaagttcactcaa

SEQ ID NO: 217 - DNA, 16 bp, Artificial sequence
  Synthetic oligonucleotide
atgtttaacatataga

SEQ ID NO: 218 - DNA, 16 bp, Artificial sequence
  Synthetic oligonucleotide
tctatatgtgtgataa

SEQ ID NO: 219 - DNA, 16 bp, Artificial sequence
  Synthetic oligonucleotide
gatttatacaacagta

SEQ ID NO: 220 - DNA, 16 bp, Artificial sequence
  Synthetic oligonucleotide
aatatttattaccatc

SEQ ID NO: 221 - DNA, 16 bp, Artificial sequence
  Synthetic oligonucleotide
tgccagggctgccatc

SEQ ID NO: 222 - DNA, 16 bp, Artificial sequence
  Synthetic oligonucleotide
tggcatgcagcatcac

SEQ ID NO: 223 - DNA, 16 bp, Artificial sequence
  Synthetic oligonucleotide
gaaacattgtgtgtga

SEQ ID NO: 224 - DNA, 16 bp, Artificial sequence
  Synthetic oligonucleotide
tgacaagccaaattga

SEQ ID NO: 225 - DNA, 16 bp, Artificial sequence
  Synthetic oligonucleotide
tggaagaagttaagaa

SEQ ID NO: 226 - DNA, 16 bp, Artificial sequence
  Synthetic oligonucleotide
taatgatactcagcaa

SEQ ID NO: 227 - DNA, 16 bp, Artificial sequence
  Synthetic oligonucleotide
gtgcagataatggtga

SEQ ID NO: 228 - DNA, 16 bp, Artificial sequence
  Synthetic oligonucleotide
agccagaagggacgag

SEQ ID NO: 229 - DNA, 16 bp, Artificial sequence
  Synthetic oligonucleotide
gaccattaggccttcc

SEQ ID NO: 230 - DNA, 16 bp, Artificial sequence
  Synthetic oligonucleotide
tagtaaaagaagcaac

SEQ ID NO: 231 - DNA, 16 bp, Artificial sequence
  Synthetic oligonucleotide
atagaaccatctttgt

SEQ ID NO: 232 - DNA, 16 bp, Artificial sequence
  Synthetic oligonucleotide
gtgtacaggtgagtgt

SEQ ID NO: 233 - DNA, 16 bp, Artificial sequence
  Synthetic oligonucleotide
tccaaggataaaaaaa

SEQ ID NO: 234 - DNA, 16 bp, Artificial sequence
  Synthetic oligonucleotide
ggcgagggtcaaaggc

SEQ ID NO: 235 - DNA, 16 bp, Artificial sequence
  Synthetic oligonucleotide
cgccatgccgccggcg

SEQ ID NO: 236 - DNA, 16 bp, Artificial sequence
  Synthetic oligonucleotide
ttagggacagccaaat

SEQ ID NO: 237 - DNA, 16 bp, Artificial sequence
  Synthetic oligonucleotide
aacatttggtgaatgt

SEQ ID NO: 238 - DNA, 16 bp, Artificial sequence
  Synthetic oligonucleotide
ctgcagttgaggttca

SEQ ID NO: 239 - DNA, 16 bp, Artificial sequence
  Synthetic oligonucleotide
cctcgaagataagcca

SEQ ID NO: 240 - DNA, 16 bp, Artificial sequence
  Synthetic oligonucleotide
ccacatgtgatgtgta

SEQ ID NO: 241 - DNA, 16 bp, Artificial sequence
  Synthetic oligonucleotide
accaagtgggcggcta

SEQ ID NO: 242 - DNA, 16 bp, Artificial sequence
  Synthetic oligonucleotide
tgcattcagttcaagg

SEQ ID NO: 243 - DNA, 16 bp, Artificial sequence
  Synthetic oligonucleotide
agacacccgtcagacc

SEQ ID NO: 244 - DNA, 16 bp, Artificial sequence
  Synthetic oligonucleotide
agaaactcttattgcg

SEQ ID NO: 245 - DNA, 16 bp, Artificial sequence
  Synthetic oligonucleotide
ctacatttgtctgata

SEQ ID NO: 246 - DNA, 16 bp, Artificial sequence
  Synthetic oligonucleotide
gaaaatgttctgagac

SEQ ID NO: 247 - DNA, 16 bp, Artificial sequence
  Synthetic oligonucleotide
cacaagtgttttctgg

SEQ ID NO: 248 - DNA, 16 bp, Artificial sequence
  Synthetic oligonucleotide
aaatccaggtctgtgg

SEQ ID NO: 249 - DNA, 16 bp, Artificial sequence
  Synthetic oligonucleotide
tcctgatgcatcggta

SEQ ID NO: 250 - DNA, 16 bp, Artificial sequence
  Synthetic oligonucleotide
ttacatcagagggatg

SEQ ID NO: 251 - DNA, 16 bp, Artificial sequence
  Synthetic oligonucleotide
aataatatactggcca

SEQ ID NO: 252 - DNA, 16 bp, Artificial sequence
  Synthetic oligonucleotide
gcaaatcccggaatcg

SEQ ID NO: 253 - DNA, 16 bp, Artificial sequence
  Synthetic oligonucleotide
ttctagagtgaatgaa

SEQ ID NO: 254 - DNA, 16 bp, Artificial sequence
  Synthetic oligonucleotide
tcaaatgggcttccaa

SEQ ID NO: 255 - DNA, 16 bp, Artificial sequence
  Synthetic oligonucleotide
gcaaatggagtgactc

SEQ ID NO: 256 - DNA, 16 bp, Artificial sequence
  Synthetic oligonucleotide
gtacagtcttcttaac

SEQ ID NO: 257 - DNA, 16 bp, Artificial sequence
  Synthetic oligonucleotide
agctggatgttcacaa

SEQ ID NO: 258 - DNA, 16 bp, Artificial sequence
  Synthetic oligonucleotide
tttcatcaaataaaag

SEQ ID NO: 259 - DNA, 16 bp, Artificial sequence
  Synthetic oligonucleotide
tagaactgggtccaca

SEQ ID NO: 260 - DNA, 16 bp, Artificial sequence
  Synthetic oligonucleotide
aaattttgtcccatat

SEQ ID NO: 261 - DNA, 16 bp, Artificial sequence
  Synthetic oligonucleotide
ccccagtagtctccta

SEQ ID NO: 262 - DNA, 16 bp, Artificial sequence
  Synthetic oligonucleotide
attcagctgagtttct

SEQ ID NO: 263 - DNA, 16 bp, Artificial sequence
  Synthetic oligonucleotide
ctcattttaaataatc

SEQ ID NO: 264 - DNA, 16 bp, Artificial sequence
  Synthetic oligonucleotide
aatcaccacatcagat

SEQ ID NO: 265 - DNA, 16 bp, Artificial sequence
  Synthetic oligonucleotide
ataaaaatcaacagcg

SEQ ID NO: 266 - DNA, 16 bp, Artificial sequence
  Synthetic oligonucleotide
tatcagcttcagtgta

SEQ ID NO: 267 - DNA, 16 bp, Artificial sequence
  Synthetic oligonucleotide
agctactccacttatg

SEQ ID NO: 268 - DNA, 16 bp, Artificial sequence
  Synthetic oligonucleotide
acaaagttttgtgcta

SEQ ID NO: 269 - DNA, 16 bp, Artificial sequence
  Synthetic oligonucleotide
caggagagtcagtagt

SEQ ID NO: 270 - DNA, 16 bp, Artificial sequence
  Synthetic oligonucleotide
ccacatgggtataagc

SEQ ID NO: 271 - DNA, 16 bp, Artificial sequence
  Synthetic oligonucleotide
ttcctagacggaggat

SEQ ID NO: 272 - DNA, 16 bp, Artificial sequence
  Synthetic oligonucleotide
aaatcggtgatcaaac

SEQ ID NO: 273 - DNA, 16 bp, Artificial sequence
  Synthetic oligonucleotide
ataagcttaaagcaca

SEQ ID NO: 274 - DNA, 16 bp, Artificial sequence
  Synthetic oligonucleotide
ggagagaggtcttgtg

SEQ ID NO: 275 - DNA, 16 bp, Artificial sequence
  Synthetic oligonucleotide
aagcagggtatcactc

SEQ ID NO: 276 - DNA, 16 bp, Artificial sequence
  Synthetic oligonucleotide
aactgaaatttgaata

SEQ ID NO: 277 - DNA, 16 bp, Artificial sequence
  Synthetic oligonucleotide
agtaactcaccgtgat

SEQ ID NO: 278 - DNA, 16 bp, Artificial sequence
  Synthetic oligonucleotide
aaaaataggtgataaa

SEQ ID NO: 279 - DNA, 16 bp, Artificial sequence
  Synthetic oligonucleotide
gaatatcttctttctt

SEQ ID NO: 280 - DNA, 16 bp, Artificial sequence
  Synthetic oligonucleotide
gatagcattaataatt

SEQ ID NO: 281 - DNA, 16 bp, Artificial sequence
  Synthetic oligonucleotide
agattaccaagcataa

SEQ ID NO: 282 - DNA, 16 bp, Artificial sequence
  Synthetic oligonucleotide
tgaaatccaaataata

SEQ ID NO: 283 - DNA, 16 bp, Artificial sequence
  Synthetic oligonucleotide
ggttatttgatgctaa

SEQ ID NO: 284 - DNA, 16 bp, Artificial sequence
  Synthetic oligonucleotide
taggaaagtgttccaa

SEQ ID NO: 285 - DNA, 16 bp, Artificial sequence
  Synthetic oligonucleotide
ccacagttcagtctac

SEQ ID NO: 286 - DNA, 16 bp, Artificial sequence
  Synthetic oligonucleotide
ctctttgtaatctaga

SEQ ID NO: 287 - DNA, 16 bp, Artificial sequence
  Synthetic oligonucleotide
catcaagcctggacaa

SEQ ID NO: 288 - DNA, 16 bp, Artificial sequence
  Synthetic oligonucleotide
acataggcataaaaat

SEQ ID NO: 289 - DNA, 16 bp, Artificial sequence
  Synthetic oligonucleotide
aaatatcatcttgttt

SEQ ID NO: 290 - DNA, 16 bp, Artificial sequence
  Synthetic oligonucleotide
ttagattaggcaagga

SEQ ID NO: 291 - DNA, 16 bp, Artificial sequence
  Synthetic oligonucleotide
caaaaatataccatgt

SEQ ID NO: 292 - DNA, 16 bp, Artificial sequence
  Synthetic oligonucleotide
aatgaagctgtcttct

SEQ ID NO: 293 - DNA, 16 bp, Artificial sequence
  Synthetic oligonucleotide
gtgatttaagatttat

SEQ ID NO: 294 - DNA, 16 bp, Artificial sequence
  Synthetic oligonucleotide
tttaatatttattacc

SEQ ID NO: 295 - DNA, 16 bp, Artificial sequence
  Synthetic oligonucleotide
ccatactctgctgtgc

SEQ ID NO: 296 - DNA, 16 bp, Artificial sequence
  Synthetic oligonucleotide
tggaagtatcttcatg

SEQ ID NO: 297 - DNA, 16 bp, Artificial sequence
  Synthetic oligonucleotide
aatgaatcatctctct

SEQ ID NO: 298 - DNA, 16 bp, Artificial sequence
  Synthetic oligonucleotide
tgtctcacagactcta

SEQ ID NO: 299 - DNA, 16 bp, Artificial sequence
  Synthetic oligonucleotide
agggataattttctag

SEQ ID NO: 300 - DNA, 16 bp, Artificial sequence
  Synthetic oligonucleotide
gagcatctgattctgg

SEQ ID NO: 301 - DNA, 16 bp, Artificial sequence
  Synthetic oligonucleotide
agctattgtggaaggt

SEQ ID NO: 302 - DNA, 16 bp, Artificial sequence
  Synthetic oligonucleotide
aaaagagggccataac

SEQ ID NO: 303 - DNA, 16 bp, Artificial sequence
  Synthetic oligonucleotide
aaaattcttactggaa

SEQ ID NO: 304 - DNA, 16 bp, Artificial sequence
  Synthetic oligonucleotide
gacataactatagtga

SEQ ID NO: 305 - DNA, 16 bp, Artificial sequence
  Synthetic oligonucleotide
ttatctatattatcta

SEQ ID NO: 306 - DNA, 16 bp, Artificial sequence
  Synthetic oligonucleotide
caggaaaaaatgtaac

SEQ ID NO: 307 - DNA, 16 bp, Artificial sequence
  Synthetic oligonucleotide
cacaatcctaggccca

SEQ ID NO: 308 - DNA, 16 bp, Artificial sequence
  Synthetic oligonucleotide
acacattgtgagagta
